(19) United States
(12) Patent Application Publication
(10) Pub. No.: US 2005/0221290 A1
(43) Pub. Date: Oct. 6, 2005

(54) Identification and validation of novel targets for agrochemicals

(76) Inventors: Dirk Inze, Moorsel-Aalst (BE); Willem Broekaert, Dilbeek (BE)

Correspondence Address: THE WEBB LAW FIRM, P.C., 700 KOPPERS BUILDING, 436 SEVENTH AVENUE, PITTSBURGH, PA, 15219, US

(21) Appl. No.: 10/510,871

(22) PCT Filed: Apr. 8, 2003
(86) PCT No.: PCT/EP03/03703

§ 371 Date: Jun. 2, 2005

(30) Foreign Application Priority Data
Apr. 10, 2002 (EP) 02447062.7
Jul. 15, 2002 (US) 60396124

(51) Int. Cl. C12Q 1/70; C12Q 1/68

(52) U.S. Cl. 435/5; 435/6

(57) ABSTRACT

The invention relates to a method for identifying and validating plant targets for agrochemicals, comprising the steps of determining gene or protein expression profiles in function of the progression of an essential biological process in a plant, and the subsequent downregulation of expression of said gene or protein in a plant cell. More particularly, the effects of downregulation of the candidate target gene were directly monitored on plants locally infected with a vector mediating viral induced gene suppression in that infected plant area. The invention also relates to isolated plant genes encoding proteins involved in plant growth and development. The invention also relates to plants tolerant to agrochemicals such as herbicides or pesticides.

[0001] The invention relates to isolated plant genes encoding proteins essential for plant growth and development and to methods for identifying and validating these genes/proteins as target genes/proteins for agrochemicals, such as herbicides. A target for an agrochemical is a gene or a protein where the agrochemical interferes with when applied to the target organism.

[0002] For the identification and validation of useful agrochemicals, the agrochemical industry traditionally relied on in vivo screening methods wherein chemical compounds were brought into direct contact with the living target organisms (e.g. plants for herbicide screening, insects for insecticide screening, etc.). However due to (i) the dramatic increase in the number of compounds that need to be screened to find a successful new agrochemical product, and (ii) the need to rely on very small quantities of compound such as are available in a combinatorial chemistry based compound libraries, and (iii) the need to identify compounds with a novel mode of action, the industry has developed a considerable interest in using more efficient and faster in vitro screening methods.

[0003] To render such in vitro screening methods more successful, it is essential to carefully select the tested target gene/proteins and/or the tested agrochemicals. It has been described that a more practical in vitro approach for finding new agrochemicals would involve identification of target genes/proteins against which the agrochemical compounds could possibly work. For this process identification of suitable target genes/proteins, the conventional methods make use of gene knock-outs of the target organism. Gene knock-out libraries are generally made as a random collection of thousands of gene knock-outs. In these methods it is investigated if the gene/protein is essential for the growth and/or viability of the organism, since the knockout of an essential gene (when present in a homozygous state) leads to a lethal or otherwise detrimental effect on the organism. The indication that said gene/protein is essential to the organisms makes it a suitable target for an agrochemical. These conventional methods are still cumbersome and time consuming because of the use of gene-knockouts. Other techniques that are useful to estimate the essential character of a gene or its. corresponding protein are based on the downregulation of said gene or protein for example via anti-sense expression technology (WO01/07601).

[0004] To render an in vitro screening for agrochemicals more successful, it is essential to carefully select the tested target gene/proteins. Therefore a more practical in vitro approach for finding new agrochemicals could be a multistep process involving the steps of (1) identification of target genes/proteins against which the agrochemical compounds could possibly work, (2) validation of the candidate target gene as being an essential gene/protein for the organism and (3) use of these target genes/proteins in an in vitro screening procedure in which the chemical compounds are tested.

[0005] It is the aim of the present invention to develop a process for the more efficient identification of candidate target genes/proteins for agrochemicals, combined with the more efficient validation of the target genes/proteins. It is a further aim of the invention to provide this process in order to design more efficiently the screening procedure with the agrochemical compound.

[0006] The method of the present invention is based on the direct use of genetic information for example generated by expression profiling of the candidate target -genes/proteins, for the identification and the validation of the targets.

[0007] Therefore according to a first embodiment of the present invention, there is now provided a method for identifying and validating plant genes/proteins as targets for agrochemicals, said method comprising the steps of:
[0008] a. determining gene or protein expression profiles during a biological process of a plant or plant cell, said biological process being necessary for the viability or the growth of the plant or plant cell;
[0009] b. selecting genes or proteins having altered expression during said biological process,
[0010] c. cloning said selected gene or the nucleic acid encoding said protein in its full-length or partial form,
[0011] d. incorporating said nucleic acid in a vector designed for downregulation of expression of said nucleic acid or the sequence homologous to said nucleic acid in a plant or plant cell.

[0012] The aim of methods of the present invention is the identification of target gene(s)/protein(s) out of a broad range of candidate plant genes/proteins. The identification step is achieved by the techniques of expression profiling described in the following embodiments. Since the method of the present invention can be used for identification of genes/proteins or proteins, the term “target” as used herein can mean a gene as well as a gene product, namely a protein, polypeptide or peptide. With the expression “target for an agrochemical” is meant a protein as well as a gene or nucleic acid encoding such protein, and when such target is inhibited, stimulated or otherwise disrupted in its normal activity by an agrochemical compound, this would lead to a desired effect in a target organism. The invention aims at efficiently identifying targets for agrochemicals. Said agrochemicals can be herbicides or pesticides as well as growth stimulators or growth regulators.

[0013] Target identification means selecting candidate targets from a larger number of genes/proteins or proteins on the basis of certain properties that give such a molecule a higher probability of being a suitable target than other molecules which do not exhibit said properties. A herbicide target is a protein or gene that when inhibited, stimulated or otherwise disrupted in its normal activity by a compound would kill the (weedy) target plant or have a strong negative effect on its growth, said compound would therefore be a candidate herbicide. An insecticide target is a protein or gene that when inhibited, stimulated or otherwise disrupted in its normal activity by a compound would kill the insect pest or have a strong negative effect on its growth, said compound would therefore be a candidate insecticide. A plant growth regulator (PGR) target is a protein or gene that when inhibited, stimulated or otherwise disrupted in its normal activity by a compound would promote or alter in a desirable way the growth of plant, said compound would therefore be a candidate PGR.

[0014] Nowadays a lot of genomic information, e.g. gene sequences, expression profiles, homologies and putative functionality, is available from genomic sequencing and expression studies in several target organisms. It is therefore of interest to develop a new method to identify and validate genes/proteins as candidate targets for agrochemicals, such methods being based on a direct use of such genomic information. This use of genomic information, e.g. the expression level of a gene, allows the selection of a limited set of appropriate candidate genes/proteins. Only this limited set of genes is then tested in the validation step, contributing to a higher efficiency and success rate of the screening procedure for agrochemicals. Furthermore, the genetic information, e.g. the functional data of the putative target gene/protein, is used as a basis to design more efficiently the in vitro screening procedure with the agrochemical compound(s) under investigation.

[0015] The present invention discloses methods that allow for the identification and validation of target genes/proteins for agrochemicals out of the broad range of possible genes/proteins and proteins. It therefore allows genes or proteins to be selected for the development of suitable in vitro screening methods for the screening of novel and efficient agrochemicals.

[0016] According to a first step of the methods of the present invention target genes or gene products are identified by using transcript profiling of the genomic content of a cell. By using this technique one immediately obtains genomic data (sequences and expression level) as well as a functional indication of the candidate target gene or gene product. Thus this method is useful for a first identification and selection of possible agrochemical target genes/proteins, since it provides as a bonus genomic and functional data on the candidate target. A good candidate target gene is a gene of which the expression varies significantly over the course of an essential biological process of the cell, since that is an indication that the gene/protein is involved in that biological process The present application describes for the first time that the determination of an expression profile of a gene during the progression of an essential biological process is used to identify possible agrochemical targets.

[0017] The expression profiling in the target identification steps of the method of the present invention is carried out in function of the progression of a process that is essential for plant growth and/or plant development and/or plant viability. In one preferred embodiment of the present invention, the essential process that is monitored in the target identification step is the process of cell division. Accordingly, in a particular embodiment of the invention, the method to identify target genes/proteins for agrochemicals is based on the transcript profiling of genes/proteins that are specifically involved in cell division. Therefore the invention provides a method as mentioned above, wherein said biological process cell division.

[0018] Other biological processes that may be monitored for the identification and validation of agrochemical targets are for instance processes that are essential for seed germination, leaf formation, etc.

[0019] The term expression profiling means determining the time and/or place when or where a gene or a protein is active. Particularly for a gene, this is achieved by monitoring the level of transcripts and therefore in the case of gene expression profiling the term transcript profiling or mRNA profiling is used.

[0020] Generally, the expression profiling in the methods of the present invention is carried out in function of the progression of a process that is essential for plant growth and/or development and/or plant viability. To achieve this, the process of interest is synchronized in a sufficient number of cells (for example in a cell culture) or organisms to allow collecting samples for expression profiling representing various stages of said process. Target identification then consists in selecting those genes or proteins that show significant changes in expression levels in function of the progression of the process of interest. It are those genes or proteins that are likely to be strongly involved or to be essential in said process.

[0021] The term “essential” means that if the gene or the gene product cannot function as normal in the cell or organism, this will have significant implication in the cell growth or cell development or other vital functions of the cell or organism.

[0022] According to the invention, the expression profiling can be studied at the level of m-RNA, using transcript profiling techniques, or alternatively at the level of protein, using proteomics-based approaches.

[0023] In one preferred embodiment of the invention, m-RNA profiling is used for identification of target genes/proteins and expression levels may be quantified via techniques that are well known to the man skilled in the art. For instance, mRNA-profiling can be performed using micro-array or macro-array technologies, this method however requires that the gene sequences are known (full length sequences or at least partial sequences) and are physically available for coating on the micro or macro array surface. Standard chips are being commercialised for Arabidopsis, and sufficient sequence information is now available for different plant species (including rice) to allow sufficient sequence data for this approach. Another approach for mRNA profiling is the use of AFLP-based transcript profiling as described in example 1. In this approach short sequence tags are monitored. In a next step these short sequence tags may be matched with full-length genes/proteins if required. Gene or protein selection thus be based on either full-length or partial sequences and it is well within the realm of the person skilled in the art to find a full length sequence based on the knowledge of a partial sequence.

[0024] Therefore, one aspect of the invention is the direct use of genetic information to select candidate targets for agrochemicals. As mentioned above this genetic information can be generated by a number of techniques. Accordingly, the present invention encompasses a method as mentioned above, wherein the expression profiles are determined by means of micro-array, macro array or c-DNA-AFLP.

[0025] According to another embodiment of the invention, proteomic based approaches may be used to identify candidate target proteins for agrochemicals.

[0026] It is now demonstrated that for the purposes of identifying a target gene for agrochemicals a synchronized culture of dividing plant cells is used to isolate samples and to monitor the expression of the transcripts of those cells during the progression of the cell division.

[0027] Therefore according to a particular embodiment, the invention also encompasses a method for the identification and validation of plant agrochemical targets, wherein said gene or protein expression profiling is based on nucleic acid or protein samples collected from a synchronized culture of dividing plant cells.

[0028] In one embodiment of the invention, the samples used for expression profiling are obtained from a synchronized culture of rice cells, tobacco cells, Arabidopsis cells or cells from any other plant species. The cell culture should be synchronized in order to obtain samples containing a sufficient amount of cells that are at the same stage of the biological process, so that the various samples taken for expression profiling are representative for the various stages of the essential biological process. In a particular embodiment of the present invention the samples are obtained from cells that are synchronized for cell division. In a preferred embodiment of the invention expression profiling is done on synchronized dividing cells. Certain cell lines are particularly suitable for synchronization of cell division, for instance synchronization of tobacco Bright Yellow-2 cell lines as described in example 1. Therefore most preferably, the synchronized cells are tobacco BY2 cells. By using synchronized tobacco BY2 cells and performing a cDNA-AFLP-based genome-wide expression analysis, the inventors built a large collection of plant cell cycle-modulated genes/proteins. Approximately 1340 periodically expressed genes/proteins were identified, including known cell cycle control genes as well as numerous novel genes. A number of plant-specific genes were found for the first time to be cell cycle modulated. Other transcript tags were derived from unknown plant genes showing homology to cell cycle-regulatory genes of other organisms. Many of the genes encode novel or uncharacterised proteins, indicating that several processes underlying cell division are still largely unknown. These sequences are presented herein as SEQ ID NO 1 to SEQ ID NO 785.

[0029] While, according to the invention, the basic criterion for identifying an agrochemical target gene or gene product consists in the differential expression levels of the gene or the protein observed during the progression of an essential biological progress, secondary selection criteria can be used and combined with this primary criterion.

[0030] One such secondary criterion may be to make a selection of genes or proteins that are found not to exhibit a high degree of homology with genes or proteins from other organisms (such as mammals) as this criterion is likely to reduce the probability that the agrochemical compounds active on the “plant-specific” target genes or gene products would also exhibit toxic effects against other organisms, for example mammals.

[0031] Another secondary selection criterion could exist in focussing on a particular phase of the essential biological process as mentioned above. For instance, when cell division modulated genes/proteins are under investigation as potential agrochemical target genes/proteins, one could preferably use those cell division modulated genes/proteins which exhibit high expression during the G1 phase, S phase, G2 phase or M phase or at the transition stages of these phases. In one embodiment of the present invention, the focus may be on the G2/M transition phase, since this phase in the plant cell cycle is considered to have more “plant specific” elements than other phases of the cell cycle and is therefore more likely to yield plant specific candidate target genes and proteins. Whereas the core cell cycle genes/proteins and the basic regulatory mechanisms controlling cell cycle progression are conserved among higher eukaryotes, basic developmental differences between plants and other organisms imply that plant-specific regulatory pathways exist that control cell division. Especially for events occurring at mitosis, plants are expected to have developed unique mechanisms regulating karyo- and cytokinesis. A typical plant cell is surrounded by a rigid wall and can as such not divide by constriction. Instead, a new cell wall between daughter nuclei is formed by a unique cytoskeletal structure called the phragmoplast, whose position is dictated by another cytoskeletal array called the preprophase band. Another major difference between plant and animal mitosis is found in the structure of the mitotic spindles: in animals, they are tightly centred at the centrosome, whereas in plants they have a diffuse appearance.

[0032] Therefore a suitable second criterion to combine with the first criterion may be to select genes/proteins that are involved in the mitosis step of the cell cycle and/or that are involved in the building of the cell wall during mitosis.

[0033] Likewise a secondary selection criterion to be combined with the first criterion may be the selection of genes or proteins from a dicotyledonous plant that do not exhibit a high degree of homology with genes or proteins from a monocotyledonous plant (or vice versa). This secondary criterion is especially relevant when identifying agrochemical target genes or proteins with the intention to selectively identify targets that would allow for subsequence screening of selective herbicides or plant growth regulators. For instance, this strategy is advantageous to find targets and agrochemicals for selective weed control, such as herbicides that kill dicotyledonous weeds in monocotyledonous crops or vice versa.

[0034] Therefore according to further embodiments, the present invention encompasses methods as mentioned above, wherein the target gene or protein meets any one or more of the above mentioned secondary selection criteria, such as being plant specific, being mitosis specific or being dicot specific etc.

[0035] The possibility for combination of criteria used for selecting target genes or proteins renders the method of the present invention more powerful than classical methods. According to a preferred embodiment the technique of the present invention allows identifying genes/proteins, to be used as agrochemical target genes/proteins, these genes being genes/proteins that are involved in cell division and control of cell cycle progression, and these genes being novel and these genes being plant specific. Therefore the method of the present invention is characterized in that it allows identifying new and unexpected agrochemical targets.

[0036] In the target gene identification step according to the present invention, genes or proteins are selected for which there is a high probability of being essential. It should be clear that the above-mentioned examples are given by way of illustration and are not meant to be limiting in any way.

[0037] Further, according to a second step in the method of the invention, the candidate agrochemical target gene or gene product is subsequently validated as being essential for the growth and/or development and/or viability of the organism. This is achieved by cloning the identified candidate target gene in a vector construct designed to downregulate said target gene in a plant or plant cell, followed by inoculating the plant with this construct and monitoring whether downregulation of the gene results in negative effects on plant growth and/or development and/or viability. A valid target gene is a target gene that causes significant effects on growth of plants or plant cells when downregulated. The present application describes for the first time the use of a particularly fast and efficient downregulation method to validate possible agrochemical targets.

[0038] Accordingly, the present invention encompasses a method as mentioned above for the identification and validation of plant targets for agrochemicals, wherein said downregulation involves a viral-induced gene silencing mechanism.

[0039] Thus, starting from a number of candidate target genes/proteins identified in the first step of the method of the invention, the target validation step aims at confirming and demonstrating the essential nature of the gene by demonstrating that severe down-regulation of the expression level of the gene has a significant effect on the organism.

[0040] In particular, when one is interested in developing a screening assay for herbicides, downregulation of the candidate target gene in a plant may result in a lethal effect, a severe inhibition of plant growth or any other (obviously) negative phenotypic effects. Alternatively, when one is interested in developing a screening assay for plant growth regulators, the effect of downregulating the target gene may be modulation or even stimulation of growth in general or modulation or even stimulation of a particular process associated with plant growth and/or development and/or architecture and/or physiology and/or biochemistry or any other phenotypic effect.

[0041] The man skilled in the art will be aware of various methods to achieve downregulation of a given gene or protein, such methods include essentially co-suppression based approaches or anti-sense based approaches as well as any other method resulting in gene silencing. Other examples of downregulation in a cell are well documented in the art and include, for example, RNAi techniques, the use of ribozymes etc. Gene silencing may also be achieved by insertion mutagenesis (for example, T-DNA insertion or transposon insertion) or by gene silencing strategies as described by, among others, Angell and Baulcombe, 1998 (WO 98/36083), Lowe et al., 1989 (WO 98/53083), Lederer et al., 1999 (WO 99/15682) or Wang et al., 1999 (WO 99/53050). Expression of an endogenous gene may also be reduced if the endogenous gene contains a mutation.

[0042] The effect of gene downregulation can be observed in stably transformed plants which can be obtained by means of various well known techniques, these techniques generally involving a plant transformation step and a plant regeneration step.

[0043] Genes/proteins which exhibit a severe negative effect when downregulated may however significantly reduce transformation and/or regeneration efficiency. Therefore, a relevant parameter indicative for the essential nature of the gene, may be a severe reduction in transformation efficiency when said particular gene is used in a down-regulation construct. In order to avoid the (negative) effect on transformation efficiency in the transformation and regeneration process, an inducible promoter system can be used. Induction of promoter activity can then be applied at a later stage (after transformation) in order to observe the effect of gene downregulation once the transformed plant or plantlet started to develop.

[0044] Further, another method for testing the effect of downregulation of a target gene, which can be used in the methods of the present invention, is based on a rapid transient transformation process and does not rely on the somewhat lengthy process of stable transformation. The use of this method for target validation in plants is part of this invention, regardless of whether target identification has been performed according to this invention.

[0045] Accordingly, in a preferred embodiment, the downregulation method is based on co-suppression and on rapid transient transfection of plant cells. The preferred method to validate genes/proteins as targets for agrochemicals is based on the cloning of the identified candidate target gene in a vector construct containing a viral replicase that is involved in the very efficient downregulation of the candidate target gene in the infected plant or plant cell via the mechanism of co-suppression. One advantage of this method for downregulation, is the fact that the infection of the host cells or the plant can be performed locally for example by inoculating the vector directly on the leaves. This allows a very fast evaluation of the effect of downregulating the candidate target since no complete transgenic plants have to be generated. Also this technique allows an easy way of monitoring the effect of the downregulated candidate target by simply looking at the changes of the infected place, for example monitoring the lethal effects on the infected leaf.

[0046] Therefore in a preferred embodiment, the downregulation method is based on co-suppression. In a more preferred embodiment of the invention this co-suppression technique is fast and easy to evaluate the effect of downregulation, so that it is suitable for dealing with high numbers of genes/proteins. This can be achieved by using viral induces gene silencing mechanisms (VIGS) and by infecting the plant directly and locally, for example on the leaves. Therefore, according to another embodiment, the present invention relates to the use of a viral-induced gene silencing system for validating plant targets for agrochemicals.

[0047] This method for severe downregulation via transient expression of the gene in the presence of certain viral elements is referred to as “virus-induced gene silencing mechanism” (VIGS) and is previously described in Ratcliff et al., Plant J., 25 237-245, 2001. Briefly, virus vectors carrying host-derived sequence inserts induce silencing of the corresponding genes/proteins in infected plants. This virus-induced gene silencing is a manifestation of an RNA-mediated defence mechanism that is related to post-transcriptional gene silencing in transgenic plants. Ratcliff et al, developed an infectious cDNA clone of Tobacco rattle virus (TRV) that has been modified to facilitate insertion of non-viral sequences and subsequent infection in plants. This vector mediates VIGS of endogenous genes/proteins in the absence of virus-induced symptoms. Unlike the other RNA virus vectors that have been used previously for VIGS, the TRV construct is able to target most RNA's in the growing points of the plant. A more detailed description of this downregulation mechanism is given in example 2.

[0048] According to particular embodiments of the present invention, the VIGS system is applied in Arabidopsis or in tobacco for the purposes of validation of a candidate agrochemical target gene.

[0049] According to a further preferred embodiment, there is provided a method for validation of a candidate agrochemical target gene, wherein the gene is downregulated in a plant via the use of infectious DNA of virus is Tobacco Rattle Virus and wherein said plant is tobacco.

[0050] The present invention relates to a combination of the above-mentioned identification and validation steps, which are especially selected so that they lead to an efficient selection of candidate target genes for agrochemicals. The outcome of the transcript profiling provides the necessary information and forms the basis for the second step, namely the validation of the target gene via incorporation of the gene sequence in the downregulation construct. The combination of these two techniques is especially useful for selecting suitable target genes/proteins for agrochemicals in a high throughput fashion. This technique thus overcomes the technical limitations of previously described techniques such as the knock-out libraries and the antisense strategies without genetic information of the genes. This new combination offers a time-saving strategy for identification of a candidate target gene and the more direct information output in the form of a real sequence, the immediate cloning of the gene in the downregulation construct and immediate application of the downregulating construct on the target organism.

[0051] The combination of these steps offers the unique opportunity to provide many high quality target genes/proteins for agrochemicals in a commercially and economically advantageous way. Furthermore, inherent to the techniques of the present invention is that the qualified target genes/proteins are accompanied with the necessary information to design a suitable in vitro screening assay with the agrochemical. This information consists of the expression characteristics of the genes/proteins and their function and importance in the essential biological process that was monitored during the transcript profiling.

[0052] In this way, the methods of the present invention overcome the practical and commercial limitations of the existing techniques.

[0053] Once this level of target validation is reached, the validated target can be selected for the development of an appropriate high-throughput in vitro screening method, wherein the agrochemical is tested. Therefore, the present invention also encompasses a method for screening candidate agrochemical compounds, comprising the use of any of the identification procedures and/or validation procedures as mentioned above. More particularly, the present invention encompasses a method for screening agrochemical compounds, comprising the use of any one or more of the sequences represented in SEQ ID NO 1 to 785.

[0054] Various methods can be used to develop suitable in vitro assays for screening the chemical compounds, depending on what is known about the biological activity of the target gene. For example, when the target is an enzyme, measurement of the enzymatic activity of the target could form the basis of the in vitro screening assay with the chemical compound.

[0055] Therefore, the methods of the present invention, the genes/proteins and the information generated by the combined identification and validation methods of the present invention, allow one to design and/or fine tune a screening for testing and/or developing agrochemicals (for example herbicides). For example if the expression pattern and the role of the target gene in the essential biological process is known, it is much easier to set up an in vitro screening assay to monitor the effect of a candidate herbicide on the target cells. Therefore it is expected that much more refined and/or efficient herbicides will be characterized using the methods of the present invention.

[0056] Also because of the knowledge of its function, one can further design the screened agrochemical compound to improve its activity for instance to improve its binding capacity to the target.

[0057] Therefore, the present invention encompasses a method for screening candidate agrochemical compounds comprising the use of any of the methods as mentioned above.

[0058] The invention may also be applied for the development of agrochemical (for example herbicide or pesticide) tolerant plants, plant tissues, plant seeds and plant cells.

[0059] Herbicides that exhibit greater potency can also have greater crop phytotoxicity. A solution to this problem is to develop crops that are resistant or tolerant to herbicides. Crop hybrids or varieties that are tolerant to the herbicides allow, for instance, for the use of herbicides that kill weeds without attendant risk of damaging the crop. Further it should be clear that when a plant is overexpressing the target of a particular herbicide, the tolerance of said plant against said herbicide will also be enhanced.

[0060] Therefore the present invention also relates to the use of the agrochemical (e.g. herbicide) target genes/proteins as identified by the method of the present invention for generating transgenic plants that are tolerant or resistant to an agrochemical (e.g. herbicide). Example of genes and gene sequences identified by the combined identification and validation methods of the present invention and which can be used as agrochemical target or that can be used to obtain herbicide tolerant plants comprise the sequences as represented in any of SEQ ID NOs 1 to 785.

[0061] These sequences are derived from tobacco, but the one skilled in the art can easily find via homology search in databases or homology search in a cDNA library the homologues genes of other plant species, for instance monocot sequences (e.g. the corresponding rice or corn sequence), and use them for the same purposes as described herein. These homology searches can be done for example with a BLAST program (Altschul et al., Nucl. Acids Res., 25 3389-3402, 1997) on a sequence database such as the GenBank database. Homology studies as referred to above can be performed using sequences present in public and/or proprietary databases and using several bioinformatics algorithms, well known to the man skilled in the art. Methods for the alignment of sequences are well known in the art, such methods include GAP, BESTFIT, BLAST, FASTA and TFASTA. GAP uses the algorithm of Needleman and Wunsch (J. Mol. Biol. 48: 443-453, 1970) to find the alignment of two complete sequences that maximizes the number of matches and minimizes the number of gaps. The BLAST algorithm calculates percent sequence identity and performs a statistical analysis of the similarity between the two sequences. The software for performing BLAST analysis is publicly available through the National Centre for Biotechnology Information.

[0062] Further, some of the tobacco sequences identified by the method of the present invention might be partial but again, the full-length sequence can easily be found based on the partial sequence. For example “transcript building” can be done based on homology search on EST databases, cDNA's or gene predictions. These databases and programs are publicly available e.g. http://www.tigr.org/.

[0063] Therefore the present invention relates to the use of the nucleic acids as identified and disclosed herein and represented in SEQ ID NO 1 to 785, and also to the use of the full length genes regenerated from the partial sequences as well as to the use of the homologues sequences isolated from the same or from other plants.

[0064] In another embodiment, the present invention relates to a nucleic acid identified according to the method of the invention. Thus the invention encompasses an isolated nucleic acid identifiable by any of the methods as mentioned above.

[0065] In another embodiment, the invention relates to a nucleic acid identified according to the method of the invention, comprising the nucleic acid sequence chosen from the group of SEQ ID NO 1 to 785 or a full length sequence thereof, or a functional homologue thereof, or a functional fragment thereof, or an immunologically active fragment thereof. Thus the invention encompasses an isolated nucleic acid, comprising at least part of a nucleic acid sequence chosen from the group of SEQ ID NO 1 to 785 a homologue, functional fragment or derivative thereof.

[0066] With “a functional fragment” is meant any part of the sequence that is responsible for the biological function or for an aspect of the biological function of the nucleic acid sequence.

[0067] Further, the invention encompasses a method for the production of an agrochemical resistant plant, comprising the use of any one or more of SEQ ID NO 1 to 785 or a homologue, functional fragment or derivative thereof or one or more of the proteins encoded by SEQ ID NO 1 to 785 or a homologue, functional fragment or derivative thereof.

[0068] In one embodiment of the present invention the sequences, the full-length sequences and the homologues are used to develop herbicide tolerant plants.

[0069] Further the invention encompasses a plant tolerant to an agrochemical, in which the expression level of one or more of the nucleic acids corresponding the SEQ ID NO 1 to 785 or the homologue, functional fragment or derivative thereof, is modulated. Further the invention encompasses any part or more preferably any harvestable part of these plants.

[0070] Therefore the invention also relates to the use of these sequences, the full-length sequences and the homologues as targets for agrochemicals The invention encompasses the use of a nucleic acid as mentioned above or the protein encoded by said isolated nucleic acid as a target for an agrochemical compound, preferably, wherein the agrochemical compound is a herbicide.

[0071] Further, the invention relates to the use of these sequences to develop screening assays for the identification and/or development of agrochemicals. The invention encompasses a method for screening candidate agrochemical compounds comprising the use of any one or more of SEQ ID NO 1 to 785 or a homologue, functional fragment or derivative thereof or one or more of the proteins corresponding to SEQ ID NO 1 to 785 or a homologue, functional fragment or derivative thereof.

[0072] The present invention will be further illustrated by the following figures, wherein,

[0073] FIG. 1 shows the gene expression profiles obtained by quality-based clustering of all transcript tags monitored in a transcript profiling experiment as described in example 1. Shown are the trend lines of 16 clusters containing 97% of the genes and covering the entire time course as indicated on top. S-phase-specific gene clusters are grouped in A, gene clusters with peak expression between S- and M-phase are grouped in B, whereas group C contains the M- and G1-phase-specific clusters. D: Three small clusters of genes with peak expression during two cell cycle phases.

[0074] FIG. 2 shows the phenotypes of tobacco plants inoculated with a acetolactate synthase (SEQ ID NO 18) downregulation construct and phenotypes of tobacco plants inoculated with a prohibitin (SEQ ID NO 21) downregulation construct. The phenotypes were observed 12 days after inoculation (upper panel) or 17 days after inoculation (lower panel).

[0075] FIG. 3 shows the phenotype of tobacco plants inoculated with a B-type CDK (SEQ ID NO 11) downregulation construct. The observations were made 37 days after inoculation.

[0076] FIG. 4 shows the sequences identified by the methods of the present invention and represented by SEQ ID NO 1 to SEQ ID NO 785

### EXAMPLES

### Example 1

[0077] A cDNA-AFLP based expression profiling of sequence obtained from samples of a synchronized tobacco BY2 cell line system, was used to identify genes that are upregulated during the cell cycle, an essential biological process needed for the viability and growth of the tobacco cell line system.

[0078] A genome-wide expression analysis of cell cycle-modulated genes in the tobacco Bright Yellow-2 (BY2) cell line was performed. This unique cell line can be synchronized to high levels with different types of inhibitors of cell cycle progression (Nagata et al., Int. Rev. Cytol., 132 1-30, 1992; Planchais et al., FEBS Lett., 476 78-83, 2000). Because of the lack of extensive molecular resources such as genomic sequences, cDNA clones or expressed sequence tags (ESTs) for tobacco, a microarray-based approach cannot be used for a transcriptome analysis. Therefore, the cDNA-AFLP technology was used to identify and characterize cell cycle-modulated genes in BY2. cDNA-AFLP is a sensitive and reproducible fragment-based technology that has a number of advantages over other methods for genome-wide expression analysis (Breyne and Zabeau, Curr. Opin. Plant Biol., 4 136-142, 2001): it does not require prior sequence information, it allows identification of novel genes, and it provides quantitative expression profiles. After a detailed analysis, it was found that around 10% of the transcripts analyzed is periodically expressed. This comprehensive collection of plant cell cycle-modulated genes provides a basis for selecting and validating novel and unexpected agrochemical target genes

[0079] Synchronization of BY2 Cells and Sampling of Material.

[0080] Tobacco BY2 (Nicotiana tabacum L. cv. Bright Yellow-2) cultured cell suspension were synchronized by blocking cells in early S-phase with aphidicolin as follows. Cultured cell suspension of Nicotiana tabacum L. cv. Bright Yellow 2 were maintained as described (Nagata et at., Int. Rev. Cytol., 132 1-30, 1992). For synchronization, a 7-day-old stationary culture was diluted 10-fold in fresh medium supplemented with aphidicolin (Sigma-Aldrich, St. Louis, Mo.; 5 mg/l), a DNA-polymerase a inhibiting drug. After 24 h, cells were released from the block by several washings with fresh medium and resumed their cell cycle progression. After the drug had been washed, samples were taken every hour, starting from the release from the aphidicolin block (time 0) until 11 h later. The mitotic index was determined by counting the number of cells undergoing mitosis under fluorescence microscopy after the DNA had been stained with 5 mg/l 4′,6-diamidino-2-phenylindole (Sigma-Aldrich). DNA content was measured by flow cytometry. This was done as follows A subsample was used to check cell cycle progression and synchrony levels. After the DNA had been stained with 5 mg/l 4′,6-diamidino-2-phenylindole (Sigma-Aldrich), the mitotic index was determined under fluorescence microscopy by counting the number of cells undergoing mitosis. A mitotic peak of approximately 40% was obtained 8 h after washing. For flow cytometry, cells were first incubated in a buffered enzyme solution (2% cellulase and 0.1% pectolyase in 0.66 M sorbitol) for 20 min at 37° C. After the suspension had been washed and resuspended in Galbraith buffer (Galbraith et al., Science, 220 1049-1051, 1983), it was filtered through a 30-μm nylon mesh to purify the DAPI-stained nuclei. The fluorescence intensity was measured using a BRYTE HS flow cytometer (Bio-Rad, Hercules, Calif.). Exit from S-phase was observed 4 h after aphidicolin release and the level of synchrony was shown to be sufficiently high throughout the time course.

[0081] RNA Extraction and cDNA Synthesis.

[0082] Total RNA was prepared by using LiCl precipitation (Sambrook et al., 1989) and poly(A⁺) RNA was extracted from 500 μg of total RNA using Oligotex columns (Qiagen, Hilden, Germany) according to the manufacturer's instructions. Starting from 1 μg of poly(A⁺) RNA, first-strand cDNA was synthesized by reverse transcription with a biotinylated oligo-dT₂₅ primer (Genset, Paris, France) and Superscript II (Life Technologies, Gaithersburg, Md.). Second-strand synthesis was done by strand displacement with Escherichia coli ligase (Life Technologies), DNA polymerase I (USB, Cleveland, Ohio) and RNAse-H (USB).

[0083] cDNA-AFLP Analysis.

[0084] Five hundred ng of double-stranded cDNA was used for AFLP analysis as described (Vos et al., Nucl. Acids Res., 23 4407-4414, 1995; Bachem et al., Plant J., 9 745- 753, 1996) with modifications. The restriction enzymes used were BstYI and MseI (Biolabs) and the digestion was done in two separate steps. After the first restriction digest with one of the enzymes, the 3′ end fragments were collected on Dyna beads (Dynal, Oslo, Norway) by means of their biotinylated tail, while the other fragments were washed away. After digestion with the second enzyme, the released restriction fragments were collected and used as templates in the subsequent AFLP steps. The adapters used were: for BstYI, 5′-CTCGTAGACTGCGTAGT-3′ and 5′-GATCACTACGCAGTCTAC-3′, and for MseI, 5′-GACGATGAGTCCTGAG-3′ and 5′-TACTCAGGACTCAT-3′; the primers for BstYI and MseI were 5′-GACTGCGTAGTGATC(T/C)N_{1,2}-3′ and 5′-GATGAGTCCTGAGTAAN_{1,2}-3′, respectively. For preamplifications, a MseI primer without selective nucleotides was combined with a BstYI primer containing either a T or a C as 3′ most nucleotide. PCR conditions were as described Vos et al., Nucl. Acids Res., 23 4407-4414, 1995): The obtained amplification mixtures were diluted 600-fold and 5 μl was used for selective amplifications using a P³³-labeled BstYI primer and the Amplitaq-Gold polymerase (Roche Diagnostics, Brussels, Belgium). Amplification products were separated on 5% polyacrylamide gels using the Sequigel system (Biorad). Dried gels were exposed to Kodak Biomax films as well as scanned in a phosphoImager (Amersham Pharmacia Biotech, Little Chalfont, UK).

[0085] Quantitative measurements of the expression profiles and data analysis. Gel images were analyzed quantitatively with the AFLP-QuantarPro image analysis software (Keygene N.V., Wageningen, The Netherlands). This software was designed for accurate lane definition, fragment detection, and quantification of band intensities. All visible AFLP fragments were scored and individual band intensities were measured per lane. The obtained data were used to determine the quantitative expression profile of each transcript. The raw data were corrected for differences in total lane intensities, after which each individual gene expression profile was variance-normalized . This was done as follows.

[0086] The obtained raw data were first corrected for differences in total lane intensities which may occur due to loading errors or differences in the efficiency of PCR amplification with a given primer combination for one or more time points. The correction factors were calculated based on constant bands throughout the time course. For each primer combination, a minimum of 10 invariable bands was selected and the intensity values were summed per lane. Each of the summed values was divided by the maximal summed value to give the correction factors. Finally, all raw values generated by QuantarPro were divided by these correction factors.

[0087] Subsequently, each individual gene expression profile was variance-normalized by standard statistical approaches as used for microarray-derived data (Tavazoie et al., Nature Genet., 22 281-285, 1999). For each transcript, the mean expression value across the time course was subtracted from each individual data point after which the obtained value was divided by the standard deviation. A coefficient of variation (CV) was calculated by dividing the standard deviation by the mean. This CV was used to establish a cut-off value and all expression profiles with a CV less than 0.25 were considered as constitutive throughout the time course.

[0088] The Cluster and TreeView software (Eisen et al., PNAS, 95 14863-14868, 1998) was used for hierarchical, average linkage clustering. Quality-based clustering was done with a newly developed software program (De Smet et al., Bioinformatics 2002 May; 18(5): 735-46). This program is related to K-means clustering, except that the number of clusters does not need to be defined in advance and that the expression profiles that do not fit in any cluster are rejected. The minimal number of tags in a cluster and the required probability of genes belonging to a cluster were set to 10 and 0.95, respectively. With these parameters, 86% of all the tags were grouped in 21 distinct clusters.

[0089] Characterization of AFLP Fragments.

[0090] Bands corresponding to differentially expressed transcripts were isolated from the gel and eluted DNA was reamplified under the same conditions as for selective amplification. Sequence information was obtained either by direct sequencing of the reamplified polymerase chain reaction product with the selective BstYI primer or after cloning the fragments in pGEM-T easy (Promega, Madison, Wis.) or sequencing of individual clones. The obtained sequences were compared against nucleotide and protein sequences present in the publicly available databases by BLAST sequence alignments (Altschul et al., Nucl. Acids Res., 25 3389-3402, 1997). When available, tag sequences were replaced with longer EST or isolated cDNA sequences to increase the chance of finding significant homology. Based on the homology, transcript tags were classified in functional groups as shown in Table 1.

Experimental Results

[0091] Identification and Characterization of Cell Cycle-Modulated Genes

[0092] Tobacco BY2 cells were synchronized by blocking cells in early S-phase with aphidicolin, an inhibitor of DNA polymerase α. After the inhibitor had been released, 12 time points with an 1-h interval were sampled, covering the cell cycle from S-phase until M-to-G1 transition. Flow cytometry and determination of the mitotic index showed that the majority of cells exit S-phase 4 h after release from blocking and that the peak of mitosis is reached at 8 h. From each time point, extracted mRNA was subjected to cDNA-AFLP-based transcript profiling.

[0093] Quantitative temporal accumulation patterns of approximately 10,000 transcript tags were determined and analyzed. In total, around 1,340 transcript tags were modulated significantly during the cell cycle. Hierarchical clustering of the expression profiles resulted in four large groups with the peak of expression in S-, early G2-, late G2-, or M-phase. Within each of these groups, several smaller clusters of genes with similar expression patterns could be distinguished. By quality-based clustering 21 different clusters were identified (see: http://www.plantgenetics/genomics/CCMgenes). In agreement with the hierarchical clustering, the four largest clusters (clusters 1 to 4 in FIG. 1) correspond to the S-, early G2-, late G2-, and M-phases and together contain 65% of all the tags. An additional cluster (cluster 5 in FIG. 1C), not clearly separated in the hierarchical clustering, includes the genes with peak expression in G1-phase and contains another 5% of the tags. The remaining clusters are much smaller and most often (e.g., clusters 6, 9, 10, and 18) include genes with a narrow temporal expression pattern. In addition to these clusters, three small groups of genes displaying elevated expression during two cell cycle phases were distinguished also by quality-based clustering (FIG. 1D).

[0094] After the transcript tags had been sequenced, homology searches revealed that 36.5% of the tags were significantly homologous to genes of known functions, 13.1% of the tags matched a cDNA or genomic sequence without allocated function, whereas for 50.4% of the tags no homology with a known sequence was found. Genes of known function belong to diverse functional classes (Table 1) revealing that several biological processes are at least partially under temporal transcriptional control during the cell cycle in plants. In general, the observed transcript accumulation profiles and cell cycle specificity correlate well with the functional properties of the corresponding genes. It is interesting that the number of transcription factors with G2-phase specificity is high, which may be related with the induction of genes involved in M-phase-specific processes. The overrepresentation of RNA-processing genes in the M-phase might indicate that post-transcriptional regulation is involved in gene activity during mitosis. Because de novo transcription is severely reduced during mitosis (Gottesfeld et al., Trends Bioch. Sci., 22 197-202, 1997). RNA-processing could provide an alternative regulatory mechanism. Intriguingly, transcript tags with homology to a gene of unknown function are overrepresented in the M-phase as well (Table 1). The principal differences in cell cycle events between plants and other organisms occur during mitosis; therefore, the inventors believe that several of these transcripts correspond to still uncharacterised plant-specific genes triggering these events. Remarkably, several of the tags homologous to a publicly available sequence have no Arabidopsis homologue, indicating that, in addition to conserved genes, different plant species possess also unique sets of cell cycle-modulated genes. Although many of these tags may be too short to significantly match with an Arabidopsis sequence, analysis of longer cDNA clones corresponding to a subset of tags has revealed that approximately 25% of the sequences remain novel.

[0095] In Tables 1 to 4 a selection of 785 sequence tags are shown. This selection was based on the criterion if the tags were full length or that showed homology with genes known to be involved in the cell cycle (group 2 SEQ ID NOs 22 to 118), or on the criterion that they show homology with genes of unknown function (group 3 SEQ ID NOs 119 to 283) or on the criterion that the sequences showed no homology with the sequences in that existing databases (group 4 SEQ ID NOs 284-785). A first group (SEQ ID Nos 1 to 21) represent a smaller selection of tags which are used in the target validation method described in the present invention, more particularly, that were used in example 2.

The Core Cell Cycle Machinery

[0096] Several tags coincide with genes belonging to the core cell cycle machinery and exhibiting distinct expression profiles. Transcript tags from five B1- or B2-type cyclins as well as from a D2-type cyclin show mitotic accumulation and exhibit a narrow temporal expression profile, confirming previous studies (Mironov et al., Plant Cell, 11 509-521, 1999; Sorrell et al., Plant Physiol., 119 343-351, 1999). Based on the transcription patterns, the six A-type cyclins fall into three groups that sequentially appear during the cell cycle, adding new data to earlier observations (Reichheld et al., PNAS, 93 13819-13824, 1996). Two groups have quite a broad window of transcript accumulation; one group, homologous to A3-type cyclins, is expressed during S-phase and disappears during G2-phase and the other group, corresponding to A2-type cyclins comes up at mid S-phase and goes down during M-phase, except for one transcript that is specific for S-phase. The third group, containing an A1-type cyclin, has the same expression pattern as the B- and D2-type cyclins. Several tags derived from genes encoding the plant-specific B-type cyclin-dependent kinases (CDKs) were also identified. CDKB1 and CDKB2 peak at the G2-to-M transition, slightly before the mitotic cyclins as describe (Porceddu et al., J. Biol. Chem., 276 36354-36360, 2001). In contrast to what has been observed in partially synchronized alfalfa cell cultures (Magyar et al., Plant Cell, 9 223-235, 1997), the transcript levels of the tags homologous to a C-type CDK accumulate differentially during the cell cycle. The transcripts are present during late M-phase and early S-phase, suggesting that CDKC is active during the G1-phase.

[0097] In addition to these well-characterized cell cycle-regulatory genes, also several tags were identified herein derived from genes encoding transcription factors and protein kinases or phosphatases with a known or putative role in cell cycle control. One tag with a sharp peak of transcript accumulation 1 h before the B- and D-type cyclins corresponds to a 3R-MYB transcription factor. Recently, a 3R-MYB has been shown to activate B-type cyclins and other genes with a so-called M-phase-specific activator domain (Ito et al., Plant Cell, 13 1891-1905, 2001). Another tag peaking in M-phase is homologous to the CCR4 associated protein CAF. CAF forms a complex with CCR4 and DBF2, resulting in a transcriptional activator involved in the regulation of diverse processes including cell wall integrity, methionine biosynthesis and M-to-G1 transition (Liu et al., EMBO J., 16 5289-5298, 1997). A majority of the tags with similarity to protein kinases and phosphatases show M-phase-specific accumulation (Table 1). Although the true identity and putative cell cycle related function remains unclear for the majority, one is highly homologous to a dual-specificity phosphatase. This type of phosphatases plays a crucial role in cell cycle control in yeast and animals (Coleman and Dunphy, Curr. Opin. Cell Biol., 6 877-882, 1994). Another M-phase-specific tag is homologous to prohibitin. In the mammalian cell cycle, prohibitin represses E2F-mediated transcription via interaction with retinoblastoma (Rb), thereby blocking cellular proliferation (Wang et al., Oncogene, 18 3501-3510, 1999).

[0098] Protein degradation by the ubiquitin-proteasome pathway also plays an important role in the control of cell cycle progression at both G1-to-S transition and exit from mitosis. Although there is little evidence for cell cycle-modulated expression of the genes encoding the various components of the ubiquitin-proteasome complexes, some proteins accumulate in a cell cycle-dependent way (del Pozo and Estelle, Plant Mol. Biol., 44 123-128, 2000). Furthermore, several tags were isolated herein from genes encoding ubiquitin-conjugating enzyme (E3), ubiquitin-protein ligase (E2), and proteasome components with an M-phase-specific expression pattern. Another transcript tag that accumulates during late M-phase is similar to cathepsin B-like proteins, which are proteolytically active and degrade diverse nuclear proteins, including Rb (Fu et al., FEBS Lett., 421 89-93, 1998).

[0099] Whereas all the core cell cycle regulatory genes have been identified that control the G2-to-M transition for which the expression is known to be cell cycle modulated, genes such as Rb and E2F, controlling G1-to-S transition were not found. These genes were probably missed because the G1-to-S transition was not included in the present analysis, what is supported by the finding that the early targets of E2F, such as polymerase α and ribonucleotide reductase, are already present at high levels at the beginning of the time course.

Genes Involved in DNA Replication and Modification

[0100] In agreement with the studies performed in yeast and human fibroblasts, transcripts encoding proteins involved in DNA replication and modification accumulated during S-phase and exhibited broad temporal expression profiles. Different replication factors, DNA polymerase (α, and the histones H3 and H4 are already present at the onset of the time course, indicating that they are induced before the time point of the aphidicolin arrest. Interestingly, most of the histones H1, H2A, and H2B appear somewhat later than H3 and H4, what might reflect that they are deposited into the nucleosomes after H3 and H4 (Luger et al., Nature, 389 251-260, 1997; Tyler et al., Nature, 402 555-560, 1999). The profile of the homologue of the anti-silencing function 1 (ASF1) protein is similar to that of the histones H3 and H4, in agreement with the fact that the three proteins are part of the replication-coupling assembly factor complex that mediates chromatin assembly (Tyler et al., Nature, 402 555-560, 1999). Genes encoding high-mobility group proteins reach the highest accumulation during late G2, consistent with the subsequent steps involved in the folding and structuring of the chromatin. Tags derived from genes encoding proteins involved in DNA modification, such as S-adenosyl-L-methionine (SAM) synthase and cytosine-5-methyl-transferase are found in the histone cluster. Tags from methionine synthase genes, which provide the precursor for SAM synthase, accumulate during M-phase, in contrast to yeast, where these genes are expressed during late S-phase (Spellman et al., Mol. Cell Biol., 9 3273-3297, 1998).

[0101] Genes involved in chromatin remodelling and transcriptional activation or repression have been identified as well. One gene is a histone deacetylase with highest transcript accumulation during the G2-phase and another belongs to the SNF2 family of chromodomain proteins with an M-phase-specific expression pattern. Interestingly, one tag corresponds to a mammalian inhibitor of growth 1 (p33-ING1) protein. The human ING1 protein has DNA-binding activity and might be involved in chromatin-mediated transcriptional regulation (Cheung and Li, Exp. Cell Res., 268 1-6, 2001). This protein accumulates during S-phase (Garkavtsev and Riabowel, Mol. Cell Biol., 17 2014-2019, 1997), what is in agreement with the expression profile we observed. The yeast homologues of ING1 are components of the histone acetyltransferase complex and show similarity to the Rb-binding protein 2 (Loewith et al., Mol. Cell Biol., 20 3807-3816, 2000). Another tag, homologous to the Arabidopsis MS13 protein, follows a similar expression profile. MSI-like proteins are involved in the regulation of histone acetylation and deacetylation and in chromatin formation (Ach et al., Plant Cell, 9 1595-1606, 1997).

[0102] The expression profiles of the different ribonucleotide reductase (RNR) genes are more complex. One gene is already expressed at high levels at the beginning of the time course and its expression is restricted to the S-phase as described (Chaboute et al., Plant Mol. Biol., 38 797-806, 1998), whereas, in contrast, another one is highly expressed in S-phase and reappears at lower levels during M-phase and a third one is M-phase-specific. This latter expression profile has also been described for a RNR gene from Xenopus where the encoded protein appears to be involved in microtubulin nucleation (Takada et al., Mol. Cell Biol., 11 4173-4187, 2000).

[0103] Numerous other transcript tags with S-phase specificity were found in addition to the ones involved in DNA replication and modification. Most interestingly, one of these tags is homologous to a mammalian gene encoding a TRAF-interacting protein (TRIP), which is a component of the tumor necrosis factor (TNF) signalling complex, and promotes cell death when complexed with TRAF (Lee et al., J. Exp. Medicine, 185 1275-1285, 1997). Another S-phase-specific tag shows homology to the RING finger domain of inhibitor of apoptosis proteins, which are also involved in the TNF signalling pathway.

Modulated Expression of Genes Required for Mitosis and Cytokinesis

[0104] Several paralogous genes that encode either α- or β-tubulin were highly induced and accumulated prior to the mitotic index peak or during early M-phase. The inventors found that in BY2, tubulin genes are highly cell cycle modulated. This transcriptional regulation is in agreement with previous demonstrations of de novo transcription of α- and β-tubulin genes during different cellular processes (Stotz et al., Plant Mol. Biol., 41 601-614, 1999). In the present analysis, no γ-tubulin genes were found, confirming published data that the amount of γ-tubulin is constant in dividing BY2 cells (Stoppin-Mellet et al., Plant Biol., 2 290-296, 2000). Most of the kinesins identified herein, fall in the same cluster as the tubulins peaking prior to mitosis. Interestingly, two tags have a distinct transcription pattern and appear in another gene cluster. Their window of transcript accumulation is very narrow and coincides with the peak of mitosis. Most interestingly, these tags correspond to the plant-specific phragmoplast-associated type of kinesin, PAKRP1 (Lee and Liu, Curr. Biol., 10 797-800, 2000). A chromokinesin not yet described in plants was identified as well. This type of motor proteins use DNA as cargo and play a role in chromosome segregation and metaphase alignment (Wang et al., J. Cell Biol., 128 761-768, 1995).

[0105] Among the M-phase-specific kinases, two were unambiguously recognized herein as playing a role in cytokinesis. One is Aurora, a protein kinase with a key role in the control of chromosome segregation, centrosome separation, and cytokinesis in yeast and animals (Bischoff and Plowman, Trends Cell Biol., 9 454-459, 1999) but not described in plants yet. The other is NRK1, a mitogen-activated protein kinase kinase which is phosphorylated by NPK1, a kinase involved in regulating the outward redistribution of phragmoplast microtubules (Nishihama et al., Genes Dev., 15 352-363, 2001).

Hormonal Regulation and Cell Cycle-Modulated Gene Expression

[0106] A number of genes belonging to the class of auxin-induced genes were also differentially expressed. Cell cycle-modulated expression of auxin-induced genes has never been observed before although auxins together with cytokinins are the two major groups of plant hormones that affect cell division (Stals and Inzé, Trends Plant Sci., 6 359-364, 2001). The genes as identified herein fall into two groups based on their transcript accumulation profiles (data not shown). The first group displays an early S-phase-specific expression pattern and consists of the parA, parB and parC genes. Induction of the par genes is most often observed in response to stress conditions (Abel & Theologis, Plant Phys. 111, 9-17, 1996). The fact that the transcripts rapidly disappear after release from the cell cycle-blocking agent might indicate a stress response rather than a cell cycle dependent auxin response.

[0107] More interesting is the second group of genes with transcripts accumulating during early M-phase. This group includes the auxin response factor 1 (ARF1), an auxin transporter as well as different members of the early auxin response AUX/IAA gene family. ARF1 is a transcription factor that binds to a particular auxin response element (Ulmasov et al., Science, 276 1865-1868, 1997). Additional studies suggest that the activity of ARF1 is controlled by its dimerization with members of the AUX1/IAA family (Walker and Estelle, Curr. Opin. Plant boil., 1 434-439, 1998). The similarity in temporal expression profiles the inventors observed supports these findings and suggests that these proteins mediate an auxin response necessary for cell cycle progression

[0108] By using tobacco BY2 as model system together with cDNA-AFLP-based transcript profiling, it is described herein for the first time how a comprehensive inventory of plant cell cycle-modulated genes can be made. Although the obtained data confirm earlier results and observations, in addition, numerous novel findings were made. The obtained data are a very useful basis for selecting and validating agrochemical target genes.

### Example 2

[0109] In this example it is described how plant genes are evaluated for assessment of their essential character in the biological process, thus how they are validated as good candidate targets for agrochemicals.

[0110] The Tobacco Rattle Virus (TVR) is used to induce silencing of target genes. In case of an essential gene the simlencing will result in a lethal effect on the plant and therefore, the suystem allows to validate good candidates as targets for herbicides.

[0111] The TRV based system is used in this example in combination with series of candidate genes, more particularly with the candidate targets as represented herein as group 1 sequences consisting of the SEQ ID NOs 1 to 21. The identification technique of the present invention (see example 1) allowed to identify new genes that are potential new herbicide targets, because of their putative function in various key processes crucial for cell life, their expression at a certain developmental stage crucial for cell life, their role in metabolism and/or maintenance of cell living state.

[0112] This example illustrates the validation of these candidate genes as novel targets for agrochemicals, via the technique of the virus-induced gene silencing (VIGS).

Gene Silencing Mechanism

[0113] The virus-induced gene silencing (VIGS) is a manifestation of an RNA-mediated defence mechanism that is related to post-transcriptional gene silencing (PTGS) in transgenic plants (Ratcliff et al., Plant J., 25 237-245, 2001). The method uses a vector with an infectious cDNA of tobacco rattle virus (TRV) modified (see below) to facilitate insertion of target sequences and modified for efficient infection of plants (e.g. tobacco). The vector mediates VIGS of endogenous genes in the absence of specific virus-induced symptoms.

[0114] The RNA-mediated defence is triggered by the virus vectors, and targets both the viral genome and the host gene corresponding to the insert. As a result, the symptoms in the infected plant are similar to loss-of-function mutants or reduced-expression mutants in the host gene. The presence of a negative growth phenotype suggests that the targeted gene is a potential herbicide target.

[0115] The process of constructing a virus vector and monitoring symptoms on infected plants is completed within a few weeks, such that virus-induced gene silencing (VIGS) provides a simple, rapid means of assigning function to genes that have been sequenced but are otherwise uncharacterized. The determination of new herbicide target genes is performed in a few weeks including gene cloning, transformation steps and tobacco plant analyses.

[0116] The TRV construct is shown to target host RNAs in the growing points of plants (Ratcliff et al., Plant J., 25 237-245, 2001) such as meristems and actively dividing cells. It has been shown that this vector overcomes many of the problem features of PVX, TMV and TGMV. For example, the TRV vector induces very mild symptoms, infects large areas of adjacent cells and silences gene expression in growing points such as meristems and actively dividing cells. Infection of tobacco plants on the leaves with TRV based constructs will affect growth and development of upper parts of the infected leaves and allow screening for growth parameters.

Construction of TRV Vectors Used in the Validation Process of the Present Invention

[0117] TRV is a positive-strand RNA virus with a bipartite genome. Proteins encoded by RNA 1 are sufficient for replication and movement within the host plant, while proteins encoded by RNA 2 allow virion formation and nematode-mediated transmission between plants (reviewed by MacFarlane, J. Gen. Virol., 80 2799-2807,1999).

[0118] The downregulation system is composed of separate cDNA clones of TRV RNA 1 and RNA 2 under the control of cauliflower mosaic virus (CaMV) 35S promoters on the transferred T-DNA of plant binary transformation vectors.

[0119] The TRV RNA 1 construct (pBINTRA6) contains a full-length infectious cDNA clone in which the RNA polymerase ORF is interrupted by intron 3 of the Arabidopsis Col-0 nitrate reductase NIA1 gene (Wilkinson and Crawford, Mol. Gen. Genet., 239 289-297, 1993), necessary to prevent expression of a TRV-encoded protein that is toxic to E. coli. This vector has been given the internal reference number p3209.

[0120] The TRV RNA 2 construct (pTV00), contains a multiple cloning site (MCS), leaving only the 5′ and 3′ untranslated regions and the viral coat protein (Ratcliff et al., Plant Cell, 11 1207-1215, 1999). This vector has the internal reference number p3930 and contains a Gateway™ cassette and the gene of interest to be tested. The genes as presented in SEQ ID NO 1 to 21 are each cloned in this vector.

[0121] cDNAs were amplified using Gateway compatible primers and the cDNAs were entered into Entry Clones by BP recombination reactions. Subsequently the entry clones comprising the gene according to any one of SEQ ID NO 1 to 21 were checked via Ban2 restriction digest. The genes of interest were then entered into destination vectors by LR recombination reactions and the destination vectors were checked via ECORV restriction digestions. These expression clones were electroporated into the Argobacterium strain GV3101 agro and the plasmid pBintra6 was electroporated into pMP90 agro.

Inoculation

[0122] To inoculate plants, Agrobacterium cultures carrying pBINTRA6 (strain C58C1RifR containing pMP90 plasmid) and pTV00 (strain GV3101 containing pMP90 plasmid) were grown and mixed and infiltrated to the leaves of Nicotiana benthamiana as previously described (English et al., Plant J., 12 597-603, 1997). Briefly, virus infection was achieved by Agrobacterium-mediated transient gene expression. Agrobacterium containing the TRV cloning vectors were grown overnight in L brith (+Tc+Km), Agrobacterium containing the helper plasmid was grown overnight in 10 ml YEB+Rif+Km. The culture was centrifuged and resuspended in 10 ml of 10 mM MgCl₂, 1 mM MES-pH5.6 and 100 μM acetosyringone and kept at room temperature for 2 h. Separate cultures containing pBINTRA6 and TRV cloning vectors were mixed in a ratio of 1:10. The culture was then infiltrated to the underside of two leaves of three-weeks old plants using a 2 ml syringe without a needle. In two independent experiments 6 plants per agroabcterium clone were infected. In this way the cloned genes (SEQ ID NO 1-21) were transferred into the cells of the infiltrated region, and could be transcribed into the viral cDNAs in the leave cells. These transcripts then serve as an inoculum to initiate systemic infection of the plant. Consequently the VIGS system is activated, resulting in the downregulation of the host cell gene, corresponding to the cloned gene of interest. All experiments involving virus-infected material was carried out in controlled growth chambers. N. benthamiana plants were germinated ad grown individually on universal potting ground in pots at 25° C. during the day (16 h) and 20° C. during the night (8 h).

[0123] The plants were phenotypically evaluated on a daily basis. Particular attention was given to visible leaf damage and growth inhibition. The effects of the suppression of gene activity using the VIGS system is measured by the phenotypic aspect of the plants, including leaf defects such as growth retardation, yellow or necrotic spots, early senescence, etc. The effects of the downregulation of genes identified by the methods of the invention are also measured on the flower structure and the flowering capacities of the transformed plants.

[0124] The severity of the phenotype is linked to the level of suppression of the gene activity and indicates the degree in which the gene is essential for the plant Therefor the phenotype is an indication of the degree in which the gene is a valid target for a herbicide.

Phenotypes of the Infected Plants.

[0125] 1. Co-suppression of the gene leads to loss of gene transcription and protein expression in the virus infected leaf and induces leaf growth modification, including leaf wrinkling, curling, wilting, leading to cell death and/or plant death.

[0126] 2. Co-suppression of the geneleads to loss of gene transcription and protein expression in the virus infected leaf and induces leaf yellowing or senescence, or cell death and necrosis, leading to plant death.

[0127] 3. Co-suppression of the gene leads to loss of gene transcription and protein expression in the virus infected leaf and induces any of the following phenotypic symptoms: chlorotic regions around infection, crisp or crunchy leaf texture around infection, numerous surface lumps on either leaf surface, abnormal trichomes, abnormal leaf size, reduced growth, reduced final size, altered vascular leaf system, altered water movement in leaf, leading to cell death and/or plant death.

[0128] 4. Co-suppression of the gene leads to loss of gene transcription and protein expression in the virus infected leaf and induces any of the following anatomical symptoms: clumps of modified cells on the surface of the leaf (either abaxial or adaxial), individual cells detached from the epidermis, swollen or modified trichome cells, modification of leaf tissue structure, cell size, cell number, tissue composition, parenchyme, epidermis, etc , leading to cell death and/or plant death.

[0129] 5. co-suppression of gene X leads to loss of gene transcription and protein expression in the virus infected leaf and induces any of the following biochemical symptoms, enzyme activity and products, degradation of leaf components and effects in neighboring leaves, stem, vascular system, degradation of cell wall structure, communication between cells, modification of cell-cell signaling leading to cell death and/or plant death.

[0130] The genes identified by the present invention can be utilized to examine herbicide tolerance mechanisms in a variety of plants cells, including gymnosperms, monocots and dicots. It is particularly useful in crop plant cells such as rice, corn, wheat, barley, rye, sugar beet, etc

### Example 3

[0131] Significant phenotypic alterations could be observed in plants infiltrated with Agrobacterium containing pBINTRA6+Bstt44-4-340 (SEQ ID NO 18, acetolactate synthetase) and pBINTRA6+Bstt2-42-520 (or T4-32-7) (SEQ ID NO 21, prohibitin) and pBINTRA6+Bstt23-4-230 (SEQ ID NO 11, B-type CDK).

[0132] At 10 days post-infiltration the first symptoms were visible. The symptoms were persistent until the end of the experiment and could be observed in at least 5 out of the 6 infiltrated plants.

[0133] The phenotypes of the plants transformed with acetolactate synthase are further described. In two separate replicated experiments, specific phenotypes on each plant infected with the acetolactate synthetase downregulation construct were observed (FIG. 2). Winkling and wrapping of the leaves as well as some chlorotic spots were observed. Thus acetolactate downregulation provoked a general growth arrest accompanied with chlorotic and necrotic areas. These observations were in line with previous reports, wherein acetolactate synthetase is described as a useful herbicide target.

[0134] The phenotypes of the plants transformed with prohibitin are further described.

[0135] In two separate replicated experiments, specific phenotypes on each plant infected with the prohibitin downregulation construct were observed (FIG. 2). These plants showed strong wrinkling of the leaves about 20 days after infection, corresponding to the expected occurrence of silencing events. Thus the downregulation of probibitin provokes a severe leaf distortion and general growth arrest.

[0136] The phenotype of the plants inoculated with a B-type CDK downregulation construct are shown in FIG. 3. A late (from 30 days after inoculation) but strong negative effect on the plant growth was observed. The plants started to grow much slower and lost their apical dominance, resulting in the increased appearance of lateral branches.

TABLE 1
Functional classification of transcript tags

| | | S | | G2 | | M | | G1 |
|---|---|---|---|---|---|---|---|---|
| Function | Tags | 27.7% | | 15.8% | | 52.9% | | 3.6% |
| Cell cycle control | 30 | 5/8 | (0.078) | 8/5 | (0.068) | 14/16 | (0.114) | 3/1 |
| Cell wall | 35 | 6/10 | (0.047) | 4/6 | (0.136) | 25/18 | [symbol] | 0/1 |
| Cytoskeleton | 43 | 1/12 | (1.2e⁻⁵) | 4/7 | (0.090) | 38/22 | [symbol] | 0/2 |
| Hormone response | 13 | 6/4 | (0.113) | 1/2 | (0.277) | 6/7 | (0.185) | 0/0 |
| Kinases/phosphatases¹ | 27 | 4/8 | (0.039) | 1/4 | (0.059) | 19/14 | (0.025) | 3/1 |
| Protein synthesis | 50 | 15/14 | (0.116) | 5/8 | (0.087) | 29/26 | (0.079) | 1/2 |
| Proteolysis | 21 | 2/6 | (0.026) | 1/3 | (0.144) | 17/11 | (0.039) | 1/1 |
| Replication and modification | 74 | 57/20 | [symbol] | 8/12 | (1.0e⁻⁵) | 8/39 | (1.0e⁻¹⁸) | 1/3 |
| RNA processing | 20 | 1/6 | (6.8e⁻³) | 1/3 | (0.137) | 18/11 | [symbol] | 0/0 |
| Signal transduction | 10 | 1/3 | (0.121) | 3/2 | (0.201) | 6/5 | (0.205) | 0/0 |
| Stress response | 20 | 6/6 | (0.192) | 2/3 | (0.229) | 10/10 | (0.159) | 2/1 |
| Transcription factors | 27 | 4/8 | (0.039) | 10/4 | [symbol] | 12/14 | (0.112) | 1/1 |
| Transport and secretion² | 31 | 5/9 | (0.047) | 2/5 | (0.076) | 21/16 | (0.031) | 3/1 |
| Unknown | 175 | 37/48 | (0.015) | 19/28 | (0.014) | 112/93 | [symbol] | 7/6 |

¹Only kinases and phosphatases with unknown biological function.
²Except small GTP-binding proteins, which are classified under signal transduction.

[0137] The total number of tags and the observed/expected number of tags within the different cell cycle phases for each functional group is given together with the probability values between parentheses as calculated based on the binomial distribution function, except for the G1-phase because the values were too small. A significant enrichment (P<e⁻³) of tags of a functional group within a particular cell cycle phase is indicated in bold.

TABLE 2
overview of group 1 of sequences used for validation of candidate target genes

| SEQ ID NO | CDS NO | Tag Name | Function | Fase |
|---|---|---|---|---|
| 1 | 2216 | 18R1850_C4-32-33_1E2 | catalase | ?? |
| 2 | 2217 | Bstt2-31-215 | phytoene desasturase | ?? |
| 3 | 2218 | Bstc13-1-145 | L-ascorbate peroxidase | M-G1 |
| 4 | 2219 | Bstc21-4-280 | GTP-bindingprotein | M |
| 5 | 2220 | Bstc33-2-310 | vacuolarsortingreceptor | M |
| 6 | 2221 | Bstc4-34-170 | probable cinnamyl alcohol dehydrogenase | G1/S—S; M-G1 |
| 7 | 2222 | Bstt34-3-470 | kinesin | M |
| 8 | 2223 | Bstt12-3-410 | B-typeCDK | M |
| 9 | 2224 | Bstt14-3-458 | squalene mono-oxygenase | G1/S—S |
| 10 | 2225 | Bstt12-1-230 | kinesin-likeprotein | M |
| 11 | 2226 | Bstt23-4-230 | B-typeCDK | M |
| 12 | 2227 | Bstt2-42-225 | B-typeCDK | M |
| 13 | 2228 | Bstt31-4-208 | arabinogalactan protein precursor | G2/M—M |
| 14 | 2229 | Bstt3-41-205 | arabinogalactan protein precursor | G2/M—M |
| 15 | 2230 | Bstt33-4-285 | chorismate synthase | S-G2 |
| 16 | 2231 | Bstt2-31-215 | kinesin-likeprotein | M |
| 17 | 2232 | Bstt41-2-400 | endo-beta-1,4glucanase | M |
| 18 | 2233 | Bstt44-4-340 | acetolactate synthase | G2/S-G2-M-G1 |
| 19 | 2234 | G17-2-13 G17-2-13 | WRKY transcription factor | ?? |
| 20 | 2235 | mapk9-ntf6.seq | mapkinase phragmoplast associated NTF6 | ?? |
| 21 | 2236 | Bstt2-42-520 | prohibitin | ?? |

[0138] TABLE 3
overview of group 2 sequences of full-length sequences that are cell cycle
modulated and of which some are involved in the cell cycle process

| SEQ ID | CDS | |
|---|---|---|
| NO | NO | Gene name |
| 22 | 0613 | Protein kinase mRNA, complete, N. tabacum, 2073 bp |
| 23 | 0614 | BY2 AA041K03 probable DNA-binding protein GBP16 - rice T02069, N. tabacum, 834 bp |
| 24 | 0615 | BY2 AA042C09 probable nuclear DNA-binding protein G2p [imported] in Arabidopsis T51151, N. tabacum, |
| | | 1185 bp |
| 25 | 0616 | BY2-AA044J17 transcription regulator-like in Arabidopsis AB025604, N. tabacum, 1893 bp |
| 26 | 0617 | BY2 AA044J23 ATP-dependent RNA helicase CA3 of the DEAD/DEAH box family; Dbp3p; BY2- |
| | | AA044J23P19G01 RNA helicase RH5 in Arabidopsis T51739 N. tabacum, 1593 bp |
| 27 | 0618 | BY2-AA046C15 protein phosphatase 2C-like in Arabidopsis BAB08417 AB025622, N. tabacum, 732 bp |
| 28 | 0619 | BY2-AA047G13 14-3—3-like protein C P93343, N. tabacum, 70 bp |
| 29 | 0620 | BY2-AA054L09 protein kinase tousled in Arabidopsis A49318 N. tabacum, 2037 bp |
| 30 | 0621 | BY2-AA066H11P19H05 phosphoprotein phosphatase 2A regulatory chain T03684 N. tabacum, 1764 bp |
| 31 | 0622 | BY2-AA069L10 transcription factor-like protein in Arabidopsis BAB09482 AB012246, N. tabacum, 831 bp |
| 32 | 0623 | BY2-AA073K06 SET protein, phospatase 2A inhibitor in Arabidopsis AAG52377.1 AC011765, N. tabacum |
| 33 | 0624 | BY2-AA073MP19B07 phosphoprotein phosphatase 2A regulatory chain T03684, N. tabacum, 1764 bp |
| 34 | 0625 | BY2-AA075H12 Putative phospatase 2A inhibitor in Arabidopsis AC011809_9 AC011809, N. tabacum, |
| | | 783 bp |
| 35 | 0626 | BY2-AA076O02P19B08 hypothetical protein kinase in Arabidopsis T47727, N. tabacum, 2514 bp |
| 36 | 0627 | BY2-AA079J13 putative casein kinase \| in Arabidopsis AAG51841.1 AC010926_4, N. tabacum, 1401 bp |
| 37 | 0628 | BY2-AA080G14 porin I 36K in potato S46959, N. tabacum, 393 bp |
| 38 | 0629 | BY2-AA081P13p21E02 separation anxiety protein-like in Arabidopsis CAB96669.1 AL360314, N. tabacum, |
| | | 492 bp |
| 39 | 0630 | Complementary copy of 0630, N. tabacum, 975 bp |
| 40 | 0631 | BY2-AA085N17p21H04 14-3—3-like protein in potato 16R P93784 N. tabacum 768 bp |
| 41 | 0632 | BY2-AA087C16p21G03 AP2 domain transcription factor homolog in potato T07784 N. tabacum, 891 bp |
| 42 | 0633 | BY2-AA088B13 putative RING zinc finger protein in Arabidopsis CAB80936.1 AL161491 N. tabacum |
| | | 1248 bp |
| 43 | 0634 | BY2-AA095M08 protein kinase homolog in Arabidopsis T02181 N. tabacum858 |
| 44 | 0635 | BY2-AA096M07 peptidyl-prolyl cis-trans isomerase-like protein BAB10691.1 AB015468 N. tabacum |
| | | 450 bp |
| 45 | 0636 | BY2-AA096M12 zinc finger protein-like in Arabidopsis BAB09106.1 AB017069 N. tabacum 1518 bp |
| 46 | 0637 | BY2-AA096M22 cell division-like protein in Arabidopsis T45963 N. tabacum 687 bp |
| 47 | 0638_1 | BY2-AA098B08p21D11 similarity to DAG protein in Arabidopsis BAA97063.1 AP000370 N. tabacum |
| | | 1146 bp |
| 48 | 0638_2 | Icl_AA091G16p21F05 N. tabacum 891 bp |
| 49 | 0639 | BY2-AA109N15 GAMM1 protein-like in Arabidopsis BAB08430.1 AB017067 N. tabacum 888 bp, (MYG1) |
| | | FAMILY, proliferation associated |
| 50 | 0640 | Complementary copy of 0640 N. tabacum, 891 bp |
| 51 | 0641 | BY2-AA114N16 unknown protein in Arabidopsis BAB03019.1 AP001297; candidate tumor suppressor |
| | | p33 ING1 homolog in Homo sapiens N. tabacum 720 bp |
| 52 | 0642 | BY2-AA115P21p22D02 NAC2 Arabidopsis AAF09254.1 AF201456_1N. tabacum 699 bp |
| 53 | 0643 | BY2-AA119N11p22G04 serine/threonine-specific protein kinase-like protein BAB09338.1 AB016879 N. tabacum |
| | | 1293 bp |
| 54 | 0662 | BY2-AA041E04 >pir∥T06678 hypothetical protein T17F15.80 - Arabidopsis thaliana |
| 55 | 0663 | BY2-AA043A01 >gb\|AAD24540.1\|AF113545_1 (AF113545) vacuole-associated annexin VCaB42 |
| | | [Nicotiana tabacum] |
| 56 | 0664 | BY2-AA044C02 >dbj\|BAA02028.1\| (D11470) chloroplast elongation factor TuB(EF-TuB).[Nicotiana |
| | | tabacum] |
| 57 | 0665 | BY2-AA044L14 dbj\|BAA97319.1\| (AB020754) gene_id:MYN8.3˜pir∥T02891˜similar to unknown protein |
| 58 | 0666 | BY2-AA045P04p01G10 sp\|Q43681\|NLTP_VIGUN PROBABLE NONSPECIFIC LIPID-TRANSFER |
| | | PROTEIN AKCS9 |
| 59 | 0667 | BY2-AA046C08p19E02 dbj\|BAB30364.1\| (AK016659) putative [Mus musculus] |
| 60 | 0668 | BY2-AA046E06 pir∥T50556 stamina pistilloidia protein Stp [imported] - garden pea |
| 61 | 0669 | BY2-AA046G14 dbj\|BAB26082.1\| (AK009117) putative [Mus musculus] |
| 62 | 0670 | BY2-AA046H23 emb\|CAA98172.1\| (Z73944) RAB8A [Lotus japonicus] |
| 63 | 0671 | BY2AA048A05 gb\|AAD15504.1\| (AC006439) putativeAAA-type ATPase [Arabidopsis thaliana] |
| 64 | 0672 | BY2-AA049K03 dbj\|BAB24909.1\| (AK007240) putative [Mus musculus] |
| 65 | 0673 | BY2-AA051A10 dbj\|BAB02543.1\| (AP000417) mitotic checkpoint protein [Arabidopsis thaliana] |
| 66 | 0674 | BY2-AA051L22p19H03 gb\|AAD48948.1\|AF147262_11 (AF147262) contains similarity to Pfam family |
| | | PF00400-WD domain |
| 67 | 0675 | BY2-AA052E10 >gb\|AAF52905.1\| (AE003628) CG4968 gene product [Drosophila melanogaster] |
| 68 | 0676 | BY2-AA052F14 >gb\|AAF79819.1\|AC007396_20 (AC0007396) T4O12.22 [Arabidopsis thaliana] |
| 69 | 0677 | BY2-AA052G16p19D04 >dbj\|BAB09843.1\| (AB005246) gene_id: MUP24.12˜unknown protein |
| | | [Arabidopsis thaliana] |
| 70 | 0678 | BY2-AA052N17 >gb\|AAG42914.1\|AF327533_1 (AF327533) unknown protein [Arabidopsis thaliana] |
| 71 | 0679_1 | BY2-AA053C11.1 >dbj\|BAB22857.1\| (AK003561) putative [Mus musculus] |
| 72 | 0679_2 | BY2-AA053C11.2 >gb\|AAC62883.1\| (AC005397) hypothetical protein [Arabidopsis thaliana] |
| 73 | 0680 | BY2-AA062A09 >gb\|AAF01061.1\|AF189284_1 (AF189284) nucleolar G-protein NOG1 [Trypanosoma |
| | | brucei] |
| 74 | 0681 | BY2-AA062G03 >pir∥T02135 hypothetical protein F8K4.10 - Arabidopsis thaliana |
| 75 | 0682 | BY2-AA065E08 >pir∥T00795 hypothetical protein F24L7.13 - Arabidopsis thaliana |
| 76 | 0683 | BY2-AA072K18 >emb\|CAB40381.1\| (AJ010819) GrpE protein [Arabidopsis thaliana] |
| 77 | 0684 | BY2-AA075K12 >gb\|AAD31331.1\|AC007354_4 (AC007354) T16B5.4 [Arabidopsis thaliana] |
| 78 | 0685 | BY2-AA076N08 >dbj\|BAA94770.1\| (AP001859) ESTs AU082761(S5084) D42006 |
| 79 | 0686 | BY2-AA080D01 >gb\|AAF80646.1\|AC012190_2 (AC012190) Contains similarity to F28O16.19 a putative |
| | | translation initiation protein |
| 80 | 0687 | BY2-AA081P14 >gb\|AAD32777.1\|AC007661_14 (AC007661) unknown protein [Arabidopsis thaliana |
| 81 | 0688 | BY2-AA082H04p21F02 >dbj\|BAB10171.1\| (AB016880) gene_id: MTG10.12˜pir∥T05795˜strong similarity |
| | | to unknown |
| 82 | 0689 | BY2-AA082H06p21G04 >pir∥T09039 hypothetical protein F26K10.110 - Arabidopsis thaliana |
| 83 | 0690 | BY2-AA082M07p21B05 >dbj\|BAB01783.1\| (AB022215) gene_id: MCB17.19˜unknown protein |
| | | [Arabidopsis thaliana] |
| 84 | 0691 | BY2-AA083B24p21C04 >dbj\|BAB08247.1\| (AB006698) gene_id: MCL19.6˜unknown protein [Arabidopsis |
| | | thaliana] |
| 85 | 0692 | BY2-AA083C05p21D02 >gb\|AAH02924.1\|AAH02924 (BC002924) Unknown (protein for |
| | | IMAGE: 3956179) [Homo sapiens] |
| 86 | 0693 | BY2-AA085D08p21C05 >pir∥T47624 hypothetical protein T5N23.10 - Arabidopsis thaliana |
| 87 | 0694 | BY2-AA085F09p21H01 >gb\|AAF79503.1\|AC002328_11 (AC002328) F20N2.15 [Arabidopsis thaliana] |
| 88 | 0695 | BY2-AA085M15p21D04 >gb\|AAF97305.1\|AC007843_8 (AC007843) Unknown protein [Arabidopsis |
| | | thaliana] |
| 89 | 0696 | BY2-AA088K23p21G05 >gb\|AAG52001.1\|AC012563_11 (AC012563) unknown protein; 64612-65506 |
| | | [Arabidosis thaliana] |
| 90 | 0697 | BY2-AA088L24p21A07 >gb\|AAD55292.1\|AC008263_23 (AC008263) Contains PF\|00249 Myb-like DNA- |
| | | binding domain. |
| 91 | 0698 | BY2-AA089F12p21H05 >gb\|AAD55274.1\|AC008263_5 (AC008263) Strong similarity to gb\|D21805 |
| | | calcium-dependent protein kinase |
| 92 | 0699 | BY2-AA089M17 >pir∥T02186 hypothetical protein F14M4.16 - Arabidopsis thaliana |
| 93 | 0700 | BY2-AA090J23p21G08 >pir∥T48545 hypothetical protein F14F18.30 - Arabidopsis thaliana |
| 94 | 0701 | BY2-AA092F12p21H06 >emb\|CAB46854.1\| (AJ388555) hypothetical protein [Canis familiaris] |
| 95 | 0702 | BY2-AA092L20p21E07 >gb\|AAD10646.1\| (AC005223) 45643 [Arabidopsis thaliana] |
| 96 | 0703 | BY2-AA093J23p21C11 >gb\|AAG51461.1\|AC069160_7 (AC069160) unknown protein [Arabidopsis |
| | | thaliana] |
| 97 | 0704 | BY2-AA093L18p21D09 >emb\|CAC15504.1\| (AJ297917) B2-type cyclin dependent kinase [Lycopersicon |
| 98 | 0705 | BY2-AA093M19 >gb\|AAG12535.1\|AC015446_16 (AC015446) Unknown protein [Arabidopsis thaliana] |
| 99 | 0706 | BY2-AA094B12p21F10 >dbj\|BAB02118.1\| (AP000381) contains similarity to unknown |
| 100 | 0707_1 | BY2-AA096G05p21A11 dbj\|BAB02118.1\| (AP000381) contains similarity to unknown |
| 101 | 0707_2 | Icl_AA094B12p21F10 |
| 102 | 0708 | BY2-AA097G22p21D10 >gb\|AAG60065.1\|AF337913_1 (AF337913) unknown protein [Arabidopsis |
| | | thaliana |
| 103 | 0709 | BY2-AA099F04 gb\|AAG52457.1\|AC010852_14 (AC010852) hypothetical protein; 12785-11538 |
| | | [Arabidopsis thaliana] |
| 104 | 0710 | BY2-AA099N08p21H09 gb\|AAK14411.1\|AC087851_3 (AC087851) unknown protein [Oryza sativa] |
| 105 | 0711 | Icl_AA100B09 ref\|NP_009820.1\|Ybr261cp [Saccharomyces cerevisiae] |
| 106 | 0712 | BY2-AA109N02 ref\|NP_002848.1\| peroxisomal farnesylated protein; Housekeeping gene 33 kD [Homo |
| | | sapiens |
| 107 | 0713 | BY2-AA114E09p22F02 pir∥T51434 hypothetical protein F2G14_10 - Arabidopsis thaliana |
| 108 | 0714 | BY2-AA115B14p22C02 dbj\|BAB08888.1\| (AB012243) gene id: MIJ24.6˜ref\|NP_013897.1˜similar to |
| | | unknown protein |
| 109 | 0715 | BY2-AA115F08p22C04 >gb\|BY2-AAH03900.1\|AAH03900 (BC003900) Similar to hypothetical protein |
| | | 384D8_6 [Mus musculus] |
| 110 | 0716 | BY2-AA115L12p22G01 >gb\|AAF43925.1\|AC012188_2 (AC012188) Contains similarity to PIT1 from |
| | | Arabidopsis thaliana |
| 111 | 0717 | BY2-AA116L23p22E01 >dbj\|BAB01460.1\| (AP000731) gene_id: MCB17.21˜unknown protein |
| | | [Arabidopsis thaliana] |
| 112 | 0718 | BY2-AA117B12p21G12 >sp\|O23708\|PSA2_ARATH PROTEASOME SUBUNIT ALPHA TYPE 2 (20S |
| | | PROTEASOME ALPHA SUBUNIT B) |
| 113 | 0719 | BY2-AA117E08p22A03 >pir∥F81195 conserved hypothetical protein NMB0465 [imported] - Neisseria |
| 114 | 0720 | BY2-AA117O08p22E03 >dbj\|BAB01753.1\| (AP000603) gb\|BY2-AAD10646.1˜gene_id: MRP15.12 |
| 115 | 0721 | BY2-AA118D23p22E02 >emb\|CAB89490.1\| (AJ277062) CRK1 protein [Beta vulgaris], cdc2 like kinase |
| 116 | 0722 | BY2-AA119D12p22H04 >dbj\|BAB01163.1\| (AP000410) gene_id: K10D20.9˜unknown protein |
| | | [Arabidopsis thaliana] |
| 117 | 0723 | BY2-AA120G12 >gb\|BY2-AAB63649.1\| (AC001645) hypothetical protein [Arabidopsis thaliana] |
| 118 | 0724 | BY2-AA120G19p22D05 >gb\|BY2-AAF69547.1\|AC008007_22 (AC008007) F12M16.18 [Arabidopsis |
| | | thaliana] |

[0139] TABLE 4
overview of group 3 sequences that show homology
with proteins of unknown function

| SEQ | | | |
|---|---|---|---|
| ID | | | |
| NO | Tag name and | Function | Fase |
| 119 | Bstc1-11-320 | | M-G1 |
| 120 | Bstc1-12-255 | | G2/M-M-G1 |
| 121 | Bstc1-12-275 | | G2/M-M-G1 |
| 122 | Bstc1-13-143 | unknownprotein | G2/M-M-G1 |
| 123 | Bstc1-13-160 | unknownprotein | G2/M-M-G1 |
| 124 | Bstc11-3-190 | | M-G1 |
| 125 | Bstc11-3-215 | putativeprotein | G2/M-M-G1 |
| 126 | Bstc11-3-230 | | G1/S; M-G1 |
| 127 | Bstc11-3-300 | unknown | M-G1 |
| 128 | Bstc13-4-168 | hypotheticalprotein | S-G2 |
| 129 | Bstc13-4-290 | hypotheticalprotein | M-G1 |
| 130 | Bstc14-205 | | G2/S-G2 |
| 131 | Bstc1-43-107 | | G2/S-G2 |
| 132 | Bstc14-3-165 | unknown | M-G1 |
| 133 | Bstc1-43-250 | unknown | G2/M-M-G1 |
| 134 | Bstc1-43-310 | hypotheticalprotein | G2/M-M |
| 135 | Bstc21-2-270 | hypotheticalprotein | G2/M-M-G1 |
| 136 | Bstc2-21-182 | unknown | M-G1 |
| 137 | Bstc22-1-275 | unknownprotein | G2-M-G1 |
| 138 | Bstc2-22-100 | unknown | G2-G2/M |
| 139 | Bstc2-22-155 | | G2-M |
| 140 | Bstc2-22-240 | hypotheticalprotein | M |
| 141 | Bstc22-2-270 | | G1/S; M-G1 |
| 142 | Bstc2-23-135 | | G2/S-G2-M |
| 143 | Bstc2-23-220 | unknown | G2-M-G1 |
| 144 | Bstc22-4-215 | hypotheticalprotein | G2/M-M |
| 145 | Bstc2-31-280 | | G2/M-M-G1 |
| 146 | Bstc23-2-240 | unknown | M |
| 147 | Bstc23-2-330 | putativeprotein | M |
| 148 | Bstc23-2-370 | | G1/S-S; |
| | | | G2/M-M-G1 |
| 149 | Bstc2-32-400 | | G1/S-S; |
| | | | G2/M-M-G1 |
| 150 | Bstc23-3-270 | | G1/S-S; -M-G1 |
| 151 | Bstc2-33-280 | unknownprotein | G1/S-S; M-G1 |
| 152 | Bstc2-34-120 | unknown | G2/M-M-G1 |
| 153 | Bstc23-4-300 | unknown | M |
| 154 | Bstc2-41-165 | | G1/S-S |
| 155 | Bstc2-42-100 | unknown | G1/S-S |
| 156 | Bstc2-43-210 | | M-G1 |
| 157 | Bstc31-185 | unknown | G2/M-M-G1 |
| 158 | Bstc3-12-145 | unknown | S-G2 |
| 159 | Bstc3-12-290 | unknown | G2/M-M-G1 |
| 160 | Bstc31-3-400 | unknown | G2/M-M-G1 |
| 161 | Bstc32-1-122 | unknown | M-G1 |
| 162 | Bstc3-21-125 | | G1/S-S; |
| | | | G2/M-M-G1 |
| 163 | Bstc32-2-150 | putativeprotein | G1/S-S; |
| | | | G2/M-M-G1 |
| 164 | Bstc32-4-193 | | |
| 165 | Bstc32-4-370 | | G1/S-S-G2/S; |
| | | | M-G1 |
| 166 | Bstc3-31-350 | putativeprotein | G1/S-S-G2/S |
| 167 | Bstc33-2-145 | hypotheticalprotein | G1/S-S; |
| | | | G2/M-M-G1 |
| 168 | Bstc3-33-350 | | G1/S-S |
| 169 | Bstc33-360 | putativeprotein | G2/M-M-G1 |
| 170 | Bstc33-4-270 | unknown | G2/M-M |
| 171 | Bstc3-41-270 | unknown | M-G1 |
| 172 | Bstc3-41-300 | | G2/M-M-G1 |
| 173 | Bstc3-41-360 | | G2/M-M-G1 |
| 174 | Bstc3-42-175 | | M-G1 |
| 175 | Bstc3-43-135 | | G1 |
| 176 | Bstc3-43-180 | | M-G1 |
| 177 | Bstc3-43-193 | unknown | G1/S-S; |
| | | | G2/M-M-G1 |
| 178 | Bstc3-43-287 | | G1/SS |
| 179 | Bstc3-44-145 | | M-G1 |
| 180 | Bstc3-44-375 | putativeprotein | M-G1 |
| 181 | Bstc4-11-120 | hypotheticalprotein | G2/M-M-G1 |
| 182 | Bstc4-11-320 | unknown | M-G1 |
| 183 | Bstc42-3-115 | unknown | M-G1 |
| 184 | Bstc42-3-125 | putativeprotein | G2/M-M-G1 |
| 185 | Bstc4-23-210 | | M-G1 |
| 186 | Bstc42-4-225 | unknown | G1/S-S-G2 |
| 187 | Bstc4-32-115 | unknownprotein | G1/S-S; |
| | | | G2/M-M-G1 |
| 188 | Bstc4-32-185 | unknown | G1/S-S |
| 189 | Bstc4-32-190 | unknown | G2/M-M |
| 190 | Bstc4-32-270 | unknown | G2/S-G2-M |
| 191 | Bstc4-32-410 | | G1/S-S-G2- |
| | | | G2/M |
| 192 | Bstc4-34-250 | | G2/M-M-G1 |
| 193 | Bstc4-41-230 | putativeprotein | G2/M-M-G1 |
| 194 | Bstc4-43-113 | unknown | M-G1 |
| 195 | Bstc44-3-125 | | G2/M-M |
| 196 | Bstt1-12-340 | unknown | G2/M-M |
| 197 | Bstt12-2-225 | | G1/S-S-G2 |
| 198 | Bstt1-22-330 | unknown | G2/M-M-G1 |
| 199 | Bstt12-2-420 | unknownprotein | G2/M-M-G1 |
| 200 | Bstt12-2-540 | hypotheticalprotein | G2/M-M-G1 |
| 201 | Bstt1-23-155 | | M-G1 |
| 202 | Bstt12-3-215 | hypotheticalprotein | G2/M-M-G1 |
| 203 | Bstt12-3-280 | unknown | G1/S-S-G2 |
| 204 | Bstt12-3-310 | hypotheticalprotein | G1/S-S |
| 205 | Bstt12-3-350 | | G1/S-S-G2- |
| | | | G2/M |
| 206 | Bstt1-24-205 | | G2/M-M-G1 |
| 207 | Bstt1-24-220 | | G1/S-S-G2 |
| 208 | Bstt1-31-170 | hypotheticalprotein | G2/M-M-G1 |
| 209 | Bstt1-31-215 | unknown | G2/M-M-G1 |
| 210 | Bstt13-210 | unknown | G2/M-M-G1 |
| 211 | Bstt14-4-310 | unknownprotein | G2/M-M-G1 |
| 212 | Bstt2-11-165 | unknown | G2/M-M-G1 |
| 213 | Bstt2-12-190 | | G1/S-S-G2 |
| 214 | Bstt21-4-150 | hypotheticalprotein | G1/S-S-G2/S |
| 215 | Bstt21-4-250 | | G1/S-S; |
| | | | G2/M-G1 |
| 216 | Bstt21-4-470 | | G2/M-M-G1 |
| 217 | Bstt22-1-170 | unknown | S-G2 |
| 218 | Bstt2-21-190 | unknown | G2/M-M |
| 219 | Bstt22-2-190 | unknown | G2/M-M-G1 |
| 220 | Bstt22-2-290 | hypotheticalprotein | G2/M-M-G1 |
| 221 | Bstt22-3-225 | | M |
| 222 | Bstt22-3-275 | unknown | G2/M-M |
| 223 | Bstt22-3-315 | TomatoEST | G2/M-M-G1 |
| 224 | Bstt22-3-370 | unknown | G2/M-M-G1 |
| 225 | Bstt22-3-390 | putativeprotein | G2/M-M-G1 |
| 226 | Bstt22-3-480 | | G2/M-M-G1 |
| 227 | Bstt23-1-140 | | S-G2-G2/M |
| 228 | Bstt23-120 | unknownprotein | G2/M-M-G1 |
| 229 | Bstt23-1-200 | | S-G2-M |
| 230 | Bstt2-31-300 | unknown | S |
| 231 | Bstt2-32-220 | | M |
| 232 | Bstt2-32-400 | hypotheticalprotein | G2/M-M-G1 |
| 233 | Bstt23-3-350 | unknown | G2-M |
| 234 | Bstt23-370 | unknown | G2/M-M-G1 |
| 235 | Bstt24-1-320 | | S-G2 |
| 236 | Bstt24-2-310 | | G2/M-M-G1 |
| 237 | Bstt2-43-210 | unknown | G2-M |
| 238 | Bstt2-43-240 | | S-G2/S |
| 239 | Bstt31-1-100 | hypotheticalprotein | G1/S-S-G2 |
| 240 | Bstt3-11-205 | | G1/S-S-G2 |
| 241 | Bstt31-1-250 | hypotheticalprotein | G2/M-M-G1 |
| 242 | Bstt31-1-430 | hypotheticalprotein | G2/M-M-G1 |
| 243 | Bstt3-12-360 | unknownprotein | G2/M-M |
| 244 | Bstt31-3-380 | | G1/S-S |
| 245 | Bstt31-4-420 | hypotheticalprotein | G2/M-M-G1 |
| 246 | Bstt32-180 | putativeprotein | G2-M-G1 |
| 247 | Bstt3-22-160 | PotatoEST/hypothetical | G1/S-S-G2 |
| | | protein | |
| 248 | Bstt32-3-175 | unknown | G2/M-M |
| 249 | Bstt32-3-325 | unknown protein | G2/M-M-G1 |
| 250 | Bstt3-24-135 | unknown | G2/M-M-G1 |
| 251 | Bstt3-24-200 | | G2/M-M-G1 |
| 252 | Bstt3-31-215 | unknownprotein | G2/M-M-G1 |
| 253 | Bstt3-31-330 | unknown | G1/S-S-G2 |
| 254 | Bstt33-1-350 | unknown | G2/M-M-G1 |
| 255 | Bstt33-1-510 | putativeprotein | G2/M-M-G1 |
| 256 | Bstt33-3-220 | unknown | G2/M-M-G1 |
| 257 | Bstt33-3-245 | unknownprotein | G2/M-M-G1 |
| 258 | Bstt3-33-550 | hypotheticalprotein | G1/S-S; M-G1 |
| 259 | Bstt33-4-140 | putativeprotein | S-G2 |
| 260 | Bstt34-2-165 | unknown | G1/S-S-G2 |
| 261 | Bstt3-42-325 | hypotheticalprotein | G2/M-M-G1 |
| 262 | Bstt3-44-150 | unknown | G2/M-M-G1 |
| 263 | Bstt3-44-250 | unknown | G2/M-M-G1 |
| 264 | Bstt34-4-310 | unknown | G2/M-M-G1 |
| 265 | Bstt3-44-345 | hypotheticalprotein | G2/M-M-G1 |
| 266 | Bstt41-2-340 | | G2/M-M-G1 |
| 267 | Bstt41-3-310 | unknown | G2/M-M |
| 268 | Bstt4-21-185 | | M-G1 |
| 269 | Bstt42-1-370 | | S-G2-G2/M |
| 270 | Bstt4-23-480 | unknown | G2/M-M-G1 |
| 271 | Bstt4-24-170 | | G2/M-M-G1 |
| 272 | Bstt43-265 | unknown | G1/S-S-G2/M |
| 273 | Bstt43-3-350 | unknown | G2/M-M-G1 |
| 274 | Bstt4-33-390 | hypotheticalprotein | G1/S-S; G2/M- |
| | | | M-G1 |
| 275 | Bstt4-34-280 | | G2/M-M-G1 |
| 276 | Bstt43-4-300 | unknownprotein | G2/M-M-G1 |
| 277 | Bstt43-4-330 | unknownprotein | G2/M-M-G1 |
| 278 | Bstt43-4-340 | | G2/M-M-G1 |
| 279 | Bstt44-4-250 | hypotheticalprotein | G2/M-M |
| 280 | Bstt4-44-400 | hypotheticalprotein | G2/M-M-G1 |
| 281 | MBc03-90 | unknown | S-G2 |
| 282 | MBc42-180 | unknown | G2-M-G1 |
| 283 | MBc43-210 | unknown | G1/S-S-G2 |

[0140] TABLE 5
overview group 4 sequences showing no homology to known genes

| SEQ | | | |
|---|---|---|---|
| ID | | | |
| NO | Tag name | Function | Fase |
| 284 | Bstc11-100 | unknown | G2/S-G2-M |
| 285 | Bstc1-11-110 | unknown | S |
| 286 | Bstc1-11-115 | unknown | G1/S-S; G2/M-M-G1 |
| 287 | Bstc1-11-120 | | G1/S-S-G2 |
| 288 | Bstc11-1-125 | unknown | G2/M-M-G1 |
| 289 | Bstc11-1-290 | NaD | G1/S; G2/M-M-G1 |
| 290 | Bstc1-12-155 | | G2/S-G2-M |
| 291 | Bstc1-12-175 | unknown | S |
| 292 | Bstc1-12-185 | unknown | G2/M-M-G1 |
| 293 | Bstc11-3-116 | unknown | S-G2 |
| 294 | Bstc11-3-118 | unknown | G2/M-M-G1 |
| 295 | Bstc1-13-120 | | S |
| 296 | Bstc1-13-130 | | G1/S-S; G2/M-M-G1 |
| 297 | Bsct1-13-132 | unknown | M-G1 |
| 298 | Bsct1-13-142 | unknown | G1/S-S |
| 299 | Bstc11-3-187 | unknown | S-G2/S |
| 300 | Bsct11-3-200 | unknown | G1/S-S-G2/S |
| 301 | Bsct11-3-290 | unknown | G2/S-G2-M-G1 |
| 302 | Bsct1-14-100 | unknown | G2/M-M |
| 303 | Bstc1-14-108 | unknown | G2/M-M-G1 |
| 304 | Bstc11-4-130 | unknown | G1/S-S-G2 |
| 305 | Bsct11-4-135 | unknown | G2/M-M-G1 |
| 306 | Bsct11-4-140 | unknown | S-G2-M |
| 307 | Bsct1-14-155 | | G2/M-M |
| 308 | Bsct1-14-165 | | G2-G2/M |
| 309 | Bsct1-14-167 | | G2-G2/M |
| 310 | Bsct11-4-175 | | G2/M-M-G1 |
| 311 | Bsct11-4-200 | unknown | G1/S-S |
| 312 | Bstc12-1-110 | unknown | S-G2 |
| 313 | Bstc1-21-150 | unknown | G2/M-M-G1 |
| 314 | Bstc12-1-160 | unknown | G2-M-G1 |
| 315 | Bstc12-1-240 | unknown | M-G1 |
| 316 | Bstc12-1-95 | unknown | G1/S-S-G2 |
| 317 | Bstc1-22-110 | | G2-M-G1 |
| 318 | Bstc12-3-103 | unknown | G2/M-M-G1 |
| 319 | Bstc12-3-125 | unknown | G1/S-S; G1 |
| 320 | Bstc12-3-235 | | M-G1 |
| 321 | Bstc12-3-237 | unknown | G1/S-S |
| 322 | Bstc12-4-130 | unknown | G2/M-M-G1 |
| 323 | Bstc12-4-133 | unknown | S-G2 |
| 324 | Bstc12-4-145 | unknown | M-G1 |
| 325 | Bstc12-4-235 | unknown | G2/M-M-G1 |
| 326 | Bstc13-1-150 | | M-G1 |
| 327 | Bstc13-2-170 | unknown | G2/M-M-G1 |
| 328 | Bstc13-2-180 | unknown | G1/S-S |
| 329 | Bstc13-2-190 | unknown | G1/S-S |
| 330 | Bstc13-2-280 | unknown | G1/S-S; G2/M-M-G1 |
| 331 | Bstc1-41-170 | unknown | G1/S-S |
| 332 | Bstc1-41-175 | unknown | G1/S-S |
| 333 | Bstc1-41-180 | unknown | G1/S-S; G2/M-M-G1 |
| 334 | Bstc1-41-210 | unknown | G1/S-S |
| 335 | Bstc1-41-230 | | G1/S; G2/M-M-G1 |
| 336 | Bstc14-2-140 | unknown | M-G1 |
| 337 | Bstc1-42-150 | unknown | G2/S-G2 |
| 338 | Bstc1-42-80 | unknown | G1/S-S-G2 |
| 339 | Bstc1-42-90 | unknown | G2-M |
| 340 | Bstc1-43-105 | | G2/M-M |
| 341 | Bstc14-3-105 | | G1/S-S; G2/M-M |
| 342 | Bstc1-43-110 | | G1/S-S; G2-M |
| 343 | Bstc14-3-130 | unknown | G2/M-M-G1 |
| 344 | Bstc1-43-140 | unknown | S-G2 |
| 345 | Bstc1-43-150 | | G2/M-M-G1 |
| 346 | Bstc1-43-175 | | S-G2 |
| 347 | Bstc1-43-185 | unknown | G1/S-S-G2/S |
| 348 | Bstc14-3-235 | unknown | G1/S-S |
| 349 | Bstc14-3-260 | unknown | G2/M-M-G1 |
| 350 | Bstc1-43-65 | unknown | G1/S-S-G2 |
| 351 | Bstc1-43-75 | unknown | S-G2 |
| 352 | Bstc1-44-138 | unknown | G1/S-S-G2/S |
| 353 | Bstc1-44-140 | unknown | G2/S-G2-M |
| 354 | Bstc1-44-157 | unknown | G2/S-G2 |
| 355 | Bstc14-95 | unknown | G2/M-M |
| 356 | Bstc21-1-100 | unknown | G2/M-M-G1 |
| 357 | Bstc21-1-140 | unknown | G1/S-S-G2 |
| 358 | Bstc21-1-145 | unknown | M-G1 |
| 359 | Bstc21-1-65 | unknown | G2-M-G1 |
| 360 | Bstc21-2-120 | | G2/M-M |
| 361 | Bstc21-2-215 | | G2/M-M |
| 362 | Bstc21-2-75 | | S-G2-M |
| 363 | Bstc2-13-110 | | G1/S-S; G2/M-M |
| 364 | Bstc2-14-100 | unknown | G2/M-M-G1 |
| 365 | Bstc21-4-120 | unknown | M-G1 |
| 366 | Bstc2-14-125 | unknown | G2/M-M-G1 |
| 367 | Bstc21-4-130 | unknown | G2/M-M-G1 |
| 368 | Bstc2-14-135 | unknown | S-G2/S |
| 369 | Bstc21-4-135 | | S-G2 |
| 370 | Bstc21-4-155 | unknown | G2/M-M-G1 |
| 371 | Bstc2-14-160 | | M-G1 |
| 372 | Bstc21-4-180 | unknown | G2/S-G2 |
| 373 | Bstc22-100 | unknown | G2-M |
| 374 | Bstc2-21-120 | unknown | G1/S-S |
| 375 | Bstc22-1-125 | unknown | S-G2 |
| 376 | Bstc2-21-170 | unknown | M-G1 |
| 377 | Bstc22-1-98 | unknown | S-G2-G2/M |
| 378 | Bstc22-2-110 | unknown | G2/M-M-G1 |
| 379 | Bstc2-22-160 | unknown | G1/S-S; G2-G2/M |
| 380 | Bstc22-2-165 | unknown | G1/S-S |
| 381 | Bstc2-22-90 | | S; G2-M |
| 382 | Bstc2-23-110 | unknown | G2/M-M |
| 383 | Bstc2-23-140 | | M-G1 |
| 384 | Bstc22-3-150 | | S-G2 |
| 385 | Bstc2-23-175 | | M-G1 |
| 386 | Bstc2-23-195 | unknown | M-G1 |
| 387 | Bstc22-3-90 | | M-G1 |
| 388 | Bstc2-24-100 | unknown | G2/M-M-G1 |
| 389 | Bstc22-4-140 | | G1/S-S-G2-M |
| 390 | Bstc2-24-165 | | G2/M-M |
| 391 | Bstc2-24-170 | unknown | G1/S-S |
| 392 | Bstc2-31-140 | unknown | G2/M-M-G1 |
| 393 | Bstc2-31-160 | | M-G1 |
| 394 | Bstc2-31-170 | unknown | M-G1 |
| 395 | Bstc23-2-135 | unknown | G2/M-M-G1 |
| 396 | Bstc2-32-285 | | G2/M-M |
| 397 | Bstc23-2-360 | unknown | G1/S; G2/M-M-G1 |
| 398 | Bstc23-2-80 | unknown | G2/M-M |
| 399 | Bstc23-3-175 | unknown | G1/S-S-G2 |
| 400 | Bstc2-33-200 | unknown | G2/M-M-G1 |
| 401 | Bstc23-3-305 | unknown | M-G1 |
| 402 | Bstc2-33-85 | | S-G2 |
| 403 | Bstc2-33-95 | unknown | G2/M-M-G1 |
| 404 | Bstc23-4-110 | unknown | G2-M |
| 405 | Bstc23-4-120 | unknown | G1/S-S-G2 |
| 406 | Bstc23-4-310 | | S-G2 |
| 407 | Bstc23-4-335 | | G2-M-G1 |
| 408 | Bstc2-41-110 | unknown | S-G2 |
| 409 | Bstc24-2-165 | | M-G1 |
| 410 | Bstc2-43-105 | unknown | S-G2-G2/M |
| 411 | Bstc2-43-130 | unknown | G2/M-M |
| 412 | Bstc24-3-285 | | G1 |
| 413 | Bstc2-43-77 | unknown | G2/M-M-G1 |
| 414 | Bstc2-43-90 | unknown | G2/M-M-G1 |
| 415 | Bstc24-4-125 | unknown | G1/S-S |
| 416 | Bstc2-44-175 | unknown | G2/M-M-G1 |
| 417 | Bstc24-4-220 | | G2/M-M-G1 |
| 418 | Bstc24-4-230 | | G2-G2/M |
| 419 | Bstc2-44-95 | unknown | M-G1 |
| 420 | Bstc31-110 | unknown | G1/S-S |
| 421 | Bstc31-1-250 | | G2/M-M |
| 422 | Bstc31-1-77 | | M-G1 |
| 423 | Bstc31-1-90 | unknown | M-G1 |
| 424 | Bstc3-12-115 | unknown | M-G1 |
| 425 | Bstc31-2-190 | unknown | G1/S-S-G2 |
| 426 | Bstc31-3-127 | unknown | G1/S-S-G2/M |
| 427 | Bstc31-3-235 | unknown | S-G2 |
| 428 | Bstc3-13-330 | | G1 |
| 429 | Bstc31-3-60 | unknown | G2-M |
| 430 | Bstc31-3-80 | unknown | S-G2-M-G1 |
| 431 | Bstc3-13-90 | unknown | G2/M-M-G1 |
| 432 | Bstc3-13-95 | unknown | M-G1 |
| 433 | Bstc3-14-105 | unknown | M-G1 |
| 434 | Bstc3-14-110 | unknown | M-G1 |
| 435 | Bstc3-14-125 | unknown | G2/M-M-G1 |
| 436 | Bstc3-14-130 | unknown | G1/S; M-G1 |
| 437 | Bstc32-1-108 | unknown | G1/S-S-G2 |
| 438 | Bstc32-1-170 | unknown | S-G2/S |
| 439 | Bstc3-21-70 | unknown | M-G1 |
| 440 | Bstc32-2-100 | unknown | G1/S-S-G2 |
| 441 | Bstc32-2-270 | unknown | G1/S; G2/M-M-G1 |
| 442 | Bstc32-2-390 | unknown | G2/M-M-G1 |
| 443 | Bstc32-2-93 | unknown | G2/M-M |
| 444 | Bstc32-3-100 | unknown | S-G2 |
| 445 | Bstc3-23-125 | unknown | G2/M-M-G1 |
| 446 | Bstc32-3-155 | | S-G2-M |
| 447 | Bstc3-23-175 | unknown | G2/M-M-G1 |
| 448 | Bstc3-23-177 | | G2/S-G2-M-G1 |
| 449 | Bstc32-3-63 | unknown | S-G2 |
| 450 | Bstc3-23-65 | | S; G2-M-G1 |
| 451 | Bstc3-24-155 | unknown | G2/M-M-G1 |
| 452 | Bstc32-4-230 | unknown | G2/M-M |
| 453 | Bstc32-4-250 | unknown | G2/M-M-G1 |
| 454 | Bstc3-24-255 | unknown | G2/M-M-G1 |
| 455 | Bstc3-24-305 | | G2-M-G1 |
| 456 | Bstc3-24-340 | unknown | G1/S-S; M-G1 |
| 457 | Bstc3-24-90 | | M-G1 |
| 458 | Bstc3-31-130 | unknown | G1/S-S-G2 |
| 459 | Bstc33-120 | unknown | G1/S-S |
| 460 | Bstc3-31-200 | | S-G2 |
| 461 | Bstc3-31-260 | unknown | G1/S-S |
| 462 | Bstc33-150 | unknown | G2/M-M-G1 |
| 463 | Bstc3-32-105 | unknown | G2-G2/M |
| 464 | Bstc3-32-120 | | G1/S-S; G2/M-M-G1 |
| 465 | Bstc3-32-240 | unknown | S-G2 |
| 466 | Bstc3-32-320 | | G1/S-S-G2; M-G1 |
| 467 | Bstc33-280 | unknown | G2-M-G1 |
| 468 | Bstc33-2-90 | unknown | S-G2 |
| 469 | Bstc33-3-105 | unknown | G2/M-M-G1 |
| 470 | Bstc33-3-115 | | G1/S-S; M-G1 |
| 471 | Bstc33-3-165 | | G1/S-S-G2/S |
| 472 | Bstc3-34-110 | | G2/M-M |
| 473 | Bstc33-4-165 | | G2/M-M |
| 474 | Bstc33-4-200 | | S |
| 475 | Bstc3-34-290 | unknown | G2/M-M-G1 |
| 476 | Bstc3-34-85 | unknown | G2-M-G1 |
| 477 | Bstc3-34-90 | unknown | G1/S-S |
| 478 | Bstc33-90 | unknown | S |
| 479 | Bstc34-115 | | G2-M-G1 |
| 480 | Bstc3-41-180 | | G2/M-M-G1 |
| 481 | Bstc34-13-300 | unknown | G/S-S; M-G1 |
| 482 | Bstc34-3-100 | | M-G1 |
| 483 | Bstc34-3-135 | | S-G2-G2/M |
| 484 | Bstc34-3-190 | | S-G2-M-G1 |
| 485 | Bstc3-43-210 | unknown | G1/S-S; M-G1 |
| 486 | Bstc34-3-210 | unknown | G2/S-G2-G2-G2/M |
| 487 | Bstc3-43-240 | | G1/S-S; G2/M-M-G1 |
| 488 | Bstc34-3-248 | unknown | S |
| 489 | Bstc34-3-263 | unknown | G2/M-M-G1 |
| 490 | Bstc3-43-280 | unknown | G2/M-M-G1 |
| 491 | Bstc34-3-95 | unknown | S |
| 492 | Bstc3-44-155 | unknown | G1/S-S; M-G1 |
| 493 | Bstc3-44-173 | | G2/M-M-G1 |
| 494 | Bstc34-80 | unknown | S-G2/S |
| 495 | Bstc4-11-117 | | G2/M-M-G1 |
| 496 | Bstc41-1-125 | unknown | M-G1 |
| 497 | Bstc41-1-130 | unknown | G2-M-G1 |
| 498 | Bstc4-11-180 | | G2/M-M-G1 |
| 499 | Bstc41-1-195 | unknown | G1/S-S-G2 |
| 500 | Bstc41-1-197 | unknown | G2/M-M-G1 |
| 501 | Bstc4-11-210 | unknown | G1/S-S-G2/S |
| 502 | Bstc41-1-210 | unknown | G1/S-S-G1/S |
| 503 | Bstc41-1-245 | unknown | M-G1 |
| 504 | Bstc4-11-350 | unknown | G2/M-M |
| 505 | Bstc41-1-90 | unknown | G2/M-M-G1 |
| 506 | Bstc4-12-150 | unknown | G2-M-G1 |
| 507 | Bstc41-2-280 | | S-G2-M |
| 508 | Bstc4-13-112 | unknown | S-G2 |
| 509 | Bstc41-3-170 | unknown | G1/S-S |
| 510 | Bstc41-3-205 | unknown | G2/M-M-G1 |
| 511 | Bstc4-13-280 | unknown | G1/S-S-G2/S |
| 512 | Bstc4-13-70 | unknown | G2/M-M-G1 |
| 513 | Bstc41-4-105 | | M-G1 |
| 514 | Bstc41-4-112 | unknown | G2/M-M |
| 515 | Bstc4-14-120 | unknown | G1/S-S; M-G1 |
| 516 | Bstc41-4-127 | unknown | S-G2-M |
| 517 | Bstc41-4-145 | unknown | G2/M-M-G1 |
| 518 | Bstc4-14-160 | unknown | G2/M-M-G1 |
| 519 | Bstc41-4-165 | unknown | G2-M-G1 |
| 520 | Bstc41-4-185 | | G1/S-S-G2 |
| 521 | Bstc41-4-270 | | G1/S-S; G2/M-M-G1 |
| 522 | Bstc42-1-150 | unknown | G2/M-M-G1 |
| 523 | Bstc4-21-155 | | G1/S-S-G2 |
| 524 | Bstc4-21-200 | unknown | S; G2/M-M-G1 |
| 525 | Bstc42-135 | unknown | G2/M-M-G1 |
| 526 | Bstc4-22-150 | unknown | G1/S-S; G1 |
| 527 | Bstc42-2-170 | | S-G2-M |
| 528 | Bstc42-2-185 | | M-G1 |
| 529 | Bstc42-2-220 | unknown | M-G1 |
| 530 | Bstc42-3-100 | unknown | M-G1 |
| 531 | Bstc4-23-115 | unknown | M-G1 |
| 532 | Bstc42-3-133 | | S-G2/S |
| 533 | Bstc4-23-135 | unknown | G2/M-M-G1 |
| 534 | Bstc42-4-110 | unknown | G1/S-S; G2/M-M-G1 |
| 535 | Bstc4-24-240 | | G1/S-S-G2 |
| 536 | Bstc4-31-260 | | G2/M-M-G1 |
| 537 | Bstc4-31-310 | unknown | S; G2/M-M-G1 |
| 538 | Bstc43-3-100 | | S-G2-M |
| 539 | Bstc43-3-103 | unknown | G2/M-M-G1 |
| 540 | Bstc43-3-135 | | M-G1 |
| 541 | Bstc43-3-175 | | G2/M-M-G1 |
| 542 | Bstc43-3-250 | unknown | M-G1 |
| 543 | Bstc4-34-135 | unknown | G2/M-M-G1 |
| 544 | Bstc4-34-185 | | G1/S-S |
| 545 | Bstc43-4-200 | unknown | G2/M-M-G1 |
| 546 | Bstc43-4-320 | | G1/S-S |
| 547 | Bstc4-41-100 | unknown | G2-M |
| 548 | Bstc4-41-105 | unknown | G1/S-S; G2/M-M-G1 |
| 549 | Bstc4-41-107 | unknown | G2/M-M-G1 |
| 550 | Bstc4-41-125 | unknown | M-G1 |
| 551 | Bstc4-41-180 | | G2/M-M-G1 |
| 552 | Bstc4-41-220 | unknown | M-G1 |
| 553 | Bstc44-150 | unknown | G2-M-G1 |
| 554 | Bstc4-42-110 | unknown | G1/M-M-G1 |
| 555 | Bstc4-42-115 | unknown | G2/M-M |
| 556 | Bstc4-42-130 | unknown | S-G2 |
| 557 | Bstc4-42-165 | unknown | G1/S-S; M-G1 |
| 558 | Bstc4-42-217 | unknown | G2/M-M-G1 |
| 559 | Bstc4-43-103 | unknown | G1/S-S-G2-G2/M |
| 560 | Bstc44-3-167 | unknown | G2/M-M-G1 |
| 561 | Bstc44-3-170 | | M-G1 |
| 562 | Bstc44-4-120 | unknown | M-G1 |
| 563 | Bstc44-4-290 | unknown | G2/M-M-G1 |
| 564 | Bstt1-11-190 | | G1/S-S |
| 565 | Bstt1-11-200 | unknown | G1/S-S-G2-G2/M |
| 566 | Bstt1-11-55 | unknown | G1/S-S |
| 567 | Bstt1-11-65 | unknown | G1/S-S-G2 |
| 568 | Bstt1-12-105 | unknown | G2/M-M |
| 569 | Bstt1-12-115 | | G1/S-S |
| 570 | Bstt1-12-230 | | S-G2 |
| 571 | Bstt1-13-150 | unknown | G2/M-M |
| 572 | Bstt1-13-230 | unknown | G2/S-G2-M |
| 573 | Bstt1-14-125 | unknown | G1/S-S |
| 574 | Bstt1-14-220 | unknown | G2/M-M |
| 575 | Bstt1-21-100 | unknown | G2/M-M |
| 576 | Bstt12-1-240 | unknown | S-G2-M |
| 577 | Bstt1-21-250 | unknown | S; G2/M-M-G1 |
| 578 | Bstt12-2-100 | unknown | G2/S-G2-M-G1 |
| 579 | Bstt12-2-140 | unknown | G2/M-M-G1 |
| 580 | Bstt1-22-160 | | G2/M-G1 |
| 581 | Bstt12-2-215 | unknown | G2/M-M |
| 582 | Bstt1-22-225 | | M-G1-G1/S |
| 583 | Bstt12-2-360 | unknown | G2/M-M-G1 |
| 584 | Bstt1-22-70 | unknown | G1/S-S |
| 585 | Bstt12-3-115 | unknown | G1/S-S-G2 |
| 586 | Bstt1-23-150 | unknown | G2-M-G1 |
| 587 | Bstt1-23-170 | unknown | G2-M |
| 588 | Bstt12-3-170 | unknown | G1/S-S |
| 589 | Bstt1-23-180 | unknown | G2/S-G2-M |
| 590 | Bstt1-23-185 | | G2-M-G1 |
| 591 | Bstt1-23-235 | unknown | G2-M |
| 592 | Bstt1-24-105 | unknown | G2/S-G2-M-G1 |
| 593 | Bstt1-24-120 | unknown | G2/M-M-G1 |
| 594 | Bstt12-4-260 | | G2/S-G2-G2/M |
| 595 | Bstt12-4-320 | | G2/M-M |
| 596 | Bstt1-31-120 | | G2/M-M-G1 |
| 597 | Bstt1-31-180 | unknown | G2/M-M-G1 |
| 598 | Bstt13-170 | unknown | G1/S-S-G2 |
| 599 | Bstt13-2-150 | | G1/S-S-G2 |
| 600 | Bstt1-32-170 | unknown | G1/S-S-G2 |
| 601 | Bstt1-32-185 | | G1/S-S |
| 602 | Bstt13-3-100 | unknown | G1/S-S-G2-M |
| 603 | Bstt1-33-170 | unknown | G1/S-S-G2 |
| 604 | Bstt13-3-320 | unknown | G2/M-M-G1 |
| 605 | Bstt1-33-66 | | G2/M-M |
| 606 | Bstt1-41-120 | unknown | G2/M-M |
| 607 | Bstt1-42-264 | unknown | G2-M-G1 |
| 608 | Bstt14-2-280 | unknown | G2/M-M-G1 |
| 609 | Bstt14-3-120 | | S-G2 |
| 610 | Bstt14-3-140 | unknown | G1-S-S-G2 |
| 611 | Bstt1-43-220 | unknown | G2/S-G2-G2/M |
| 612 | Bstt1-43-330 | unknown | G2/M-M-G1 |
| 613 | Bstt14-3-460 | unknown | G2/M-M |
| 614 | Bstt14-4-130 | unknown | S-G2 |
| 615 | Bstt14-4-150 | unknown | G2 |
| 616 | Bstt14-4-195 | | S-G2-M |
| 617 | Bstt14-4-220 | | G2/S-G2-G2/M |
| 618 | Bstt14-85 | nohits | G2/M-M |
| 619 | Bstt21-1-170 | unknown | G2/M-M |
| 620 | Bstt2-11-290 | | G2/S-G2-G2/M |
| 621 | Bstt2-11-540 | | G1/S-S |
| 622 | Bstt21-2-190 | | G2/M-M-G1 |
| 623 | Bstt2-13-165 | | S-G2-M |
| 624 | Bstt2-13-170 | unknown | G2/M-M |
| 625 | Bstt2-14-130 | unknown | G2/M-M |
| 626 | Bstt2-14-175 | unknown | S-G2 |
| 627 | Bstt22-1-140 | unknown | S-G2 |
| 628 | Bstt2-21-300 | unknown | G2/M-M |
| 629 | Bstt22-2-110 | unknown | G1/S-G2 |
| 630 | Bstt22-2-255 | | G1/S-S-G2-G2/M |
| 631 | Bstt22-2-370 | | G1/S-G2 |
| 632 | Bstt22-3-100 | unknown | G2/M-M-G1 |
| 633 | Bstt22-3-145 | unknown | G2/M-M-G1 |
| 634 | Bstt2-23-220 | unknown | G2-M-G1 |
| 635 | Bstt2-23-370 | | G1/S-G2 |
| 636 | Bstt22-4-145 | unknown | G2/M-M |
| 637 | Bstt22-4-170 | | S-G2 |
| 638 | Bstt22-4-175 | | G2-M |
| 639 | Bstt22-80 | unknown | G2/M-M |
| 640 | Bstt23-1-128 | unknown | S-G2 |
| 641 | Bstt23-1-155 | unknown | S-G2-G2/M |
| 642 | Bstt2-31-200 | unknown | G2/S-G2 |
| 643 | Bstt23-170 | unknown | G2/M-M-G1 |
| 644 | Bstt2-32-175 | unknown | G2/S-G2-G2/M |
| 645 | Bstt23-220 | | G1/S-S-G2 |
| 646 | Bstt23-3-200 | | G1/S-S-G2/S |
| 647 | Bstt23-3-265 | | S-G2-G2/M |
| 648 | Bstt23-3-330 | | G1/S-S |
| 649 | Bstt2-34-170 | unknown | G2/M-M-G1 |
| 650 | Bstt23-4-180 | | S-G2-M |
| 651 | Bstt23-4-210 | | G2/M-M-G1 |
| 652 | Bstt2-41-170 | unknown | G1/S-S-G2 |
| 653 | Bstt24-1-170 | unknown | S-G2 |
| 654 | Bstt2-41-390 | | S-G2 |
| 655 | Bstt2-42-300 | | G2/M-M-G1 |
| 656 | Bstt24-2-318 | | S-G2 |
| 657 | Bstt24-2-320 | unknown | G2/M-M-G1 |
| 658 | Bstt24-290 | unknown | G2/M-M |
| 659 | Bstt2-43-150 | | S-G2 |
| 660 | Bstt2-43-160 | | S-G2/S |
| 661 | Bstt2-43-50 | | S |
| 662 | Bstt2-43-65 | unknown | S-G2 |
| 663 | Bstt2-44-230 | | G2/S-G2-M |
| 664 | Bstt2-44-240 | unknown | G1/S-S-G2 |
| 665 | Bstt24-4-240 | unknown | G1/S-S-G2/S |
| 666 | Bstt24-4-260 | unknown | G1/S-S |
| 667 | Bstt24-4-283 | unknown | G1/S-S-G2 |
| 668 | Bstt24-4-285 | unknown | G2/M-M-G1 |
| 669 | Bstt31-1-145 | | S-G2-M |
| 670 | Bstt31-1-210 | | G2/M-M-G1 |
| 671 | Bstt31-2-165 | unknown | G2/S-G2 |
| 672 | Bstt31-2-185 | | G2/M-M-G1 |
| 673 | Bstt3-12-200 | unknown | G2/M-M-G1 |
| 674 | Bstt3-12-315 | | S-G2-M |
| 675 | Bstt31-2-330 | | G2/M-M-G1 |
| 676 | Bstt3-13-110 | unknown | S-G2-G2/M |
| 677 | Bstt31-3-180 | | S-G2-G2/M |
| 678 | Bstt3-13-360 | | G2/M-M |
| 679 | Bstt3-14-130 | unknown | G2/M-M |
| 680 | Bstt3-14-135 | unknown | G2/M-M |
| 681 | Bstt31-50 | unknown | G1/S-S-G2-G2/M |
| 682 | Bstt32-1-105 | | S-G2 |
| 683 | Bstt3-21-165 | | G2/S-G2 |
| 684 | Bstt3-21-305 | unknown | G2/M-M |
| 685 | Bstt32-140 | unknown | S-G2/S |
| 686 | Bstt3-22-100 | | G2/M-M-G1 |
| 687 | Bstt32-2-210 | | S-G2-M |
| 688 | Bstt3-22-280 | unknown | G1/S-S; M-G1 |
| 689 | Bstt32-2-510 | unknown | S-G2-G2/M |
| 690 | Bstt32-3-115 | | G2/S-G2 |
| 691 | Bstt32-3-155 | unknown | S-G2 |
| 692 | Bstt32-3-160 | | M |
| 693 | Bstt32-3-180 | unknown | G1/S-S-G2 |
| 694 | Bstt3-23-205 | unknown | S-G2-M |
| 695 | Bstt3-23-65 | unknown | G2/M-M-G1 |
| 696 | Bstt32-4-170 | unknown | S; M |
| 697 | Bstt32-4-195 | | G1/S-S; G2/M-M-G1 |
| 698 | Bstt32-4-260 | unknown | G1/S-S |
| 699 | Bstt3-24-390 | | M-G1 |
| 700 | Bstt33-1-105 | | G1/S-S-G2 |
| 701 | Bstt33-1-128 | | S-G2 |
| 702 | Bstt33-1-132 | unknown | G2/M-M |
| 703 | Bstt33-1-160 | unknown | G2/M-M-G1 |
| 704 | Bstt33-1-185 | | M-G1 |
| 705 | Bstt33-140 | unknown | G2/M-M-G1 |
| 706 | Bstt33-2-75 | unknown | G1/S-S-G2 |
| 707 | Bstt33-2-85 | | G1/S-S; G2/M-G1 |
| 708 | Bstt33-3-110 | | G1/S-S; G2/M-M-G1 |
| 709 | Bstt33-3-125 | unknown | G2/M-M-G1 |
| 710 | Bstt3-33-170 | unknown | S-G2/S |
| 711 | Bstt33-4-110 | | S-G2 |
| 712 | Bstt33-4-120 | unknown | G1/S-S-G2 |
| 713 | Bstt33-4-130 | unknown | G2/M-M |
| 714 | Bstt33-95 | unknown | G2/M-M |
| 715 | Bstt34-1-110 | | S-G2-G2/M |
| 716 | Bstt34-1-170 | | G1/S-S-G2-G2/M |
| 717 | Bstt3-42-350 | unknown | G2/M-M-G1 |
| 718 | Bstt3-43-145 | unknown | G2/M-M-G1 |
| 719 | Bstt3-43-190 | unknown | G1/S-S; M-G1 |
| 720 | Bstt3-43-265 | | G2/S-G2-M-G1 |
| 721 | Bstt3-43-280 | unknown | G2/M-M-G1 |
| 722 | Bstt34-70 | unknown | S |
| 723 | Bstt41-3-100b | unknown | 2/M-M |
| 724 | Bstt41-3-130 | unknown | G2/M-M-G1 |
| 725 | Bstt41-3-140 | unknown | G2/M-M-G1 |
| 726 | Bstt41-3-180 | | G2-M |
| 727 | Bstt41-3-230 | unknown | S-G2 |
| 728 | Bstt41-3-90 | unknown | G2/M-M-G1 |
| 729 | Bstt41-4-210 | unknown | S-G2-M-G1 |
| 730 | Bstt4-14-500 | | G2/M-M-G1 |
| 731 | Bstt41-70 | unknown | G1/S-S |
| 732 | Bstt42-1-130 | unknown | G2/M-M-G1 |
| 733 | Bstt42-1-290 | unknown | G2/M-M |
| 734 | Bstt4-21-60 | unknown | S-G2 |
| 735 | Bstt4-22-100 | | M-G1 |
| 736 | Bstt4-22-360 | | S-G2 |
| 737 | Bstt42-3-105 | unknown | G1/S-S-G2/S |
| 738 | Bstt42-3-110 | unknown | G2/M-M-G1 |
| 739 | Bstt4-23-130 | | S-G2/M |
| 740 | Bstt4-23-160 | | G2/S-G2-M |
| 741 | Bstt42-4-150 | unknown | G1/S-S-G2 |
| 742 | Bstt4-24-270 | unknown | G2/M-M-G1 |
| 743 | Bstt42-4-390 | unknown | M-G1 |
| 744 | Bstt43-1-290 | unknown | G2/M-M-G1 |
| 745 | Bstt43-1-85 | | G1/S-S-G2/S |
| 746 | Bstt4-32-230 | unknown | G1/S-S-G2/S |
| 747 | Bstt43-2-238 | | G2/M |
| 748 | Bstt43-3-145 | unknown | G1/S-S-G2 |
| 749 | Bstt43-3-210 | | G2/M-M-G1 |
| 750 | Bstt43-4-230 | unknown | G2/M-M-G1 |
| 751 | Bstt4-34-75 | unknown | G2/S-G2-M |
| 752 | Bstt44-1-125 | unknown | S-G2-G2/M |
| 753 | Bstt44-185 | unknown | M-G1 |
| 754 | Bstt44-2-135 | | G2/M-M-G1 |
| 755 | Bstt4-42-150 | unknown | M |
| 756 | Bstt4-42-390 | unknown | M-G1 |
| 757 | Bstt44-3-240 | unknown | G2/M-M-G1 |
| 758 | Bstt44-3-250 | unknown | S-G2-G2/M |
| 759 | Bstt4-44-148 | | G2/M-M-G1 |
| 760 | Bc02-100 | unknown | G2/M-M |
| 761 | Bc02-120 | unknown | G2/M-M |
| 762 | Bc03-110 | unknown | G2/M-M |
| 763 | Bc03-85 | | G2/M-M |
| 764 | Bc11-135 | unknown | G2-M |
| 765 | Bc12-150 | | S-G2-M |
| 766 | Bc31-185 | unknown | G2/M-M |
| 767 | M Bc32-107 | unknown | G2/M-M-G1 |
| 768 | M Bc32-110 | unknown | G2/M-M-G1 |
| 769 | M Bc41-110 | unknown | G1/S-S; G2/M-M |
| 770 | M Bc42-280 | unknown | G2-M |
| 771 | M Bc43-95 | unknown | G2-M |
| 772 | M Bc44-130 | | S-G2 |
| 773 | M Bc44-95 | unknown | G2/M-M |
| 774 | M Bt12-80 | unknown | G2/M-M |
| 775 | M Bt12-95 | | M |
| 776 | M Bt13-105 | unknown | M-G1 |
| 777 | M Bt14-100 | unknown | G2/M-M-G1 |
| 778 | M Bt14-85 | unknown | S-G2-M |
| 779 | M Bt14-90 | unknown | G2-M |
| 780 | M Bt31-95 | | S-G2-M |
| 781 | M Bt33-115 | | G2/M-M-G1 |
| 782 | M Bt33-133 | | G2-M |
| 783 | M Bt42-135 | unknown | G2-M |
| 784 | M Bt43-95 | unknown | G2-G2/M |
| 785 | M Bt44-145 | unknown | G1/S-S-G2-M |

1-16. (canceled)

17: A method for identifying and validating plant genes/proteins as targets for agrochemicals, said method comprising the steps of:
a. determining gene or protein expression profiles during a biological process of a plant or plant cell, said biological process being necessary for the growth and/or development and/or viability of the plant or plant cell;
b. selecting genes or proteins having altered expression during said biological process;
c. cloning said selected gene or the nucleic acid encoding said protein in its full-length or partial form;
d. incorporating said nucleic acid in a vector designed for downregulation of expression of said nucleic acid or the sequence homologous to said nucleic acid in a plant or plant cell.

18: The method according to claim 17, wherein said biological process is cell division.

19: The method according to claim 17, wherein said gene or protein expression profiling is based on nucleic acid or protein samples collected from a synchronized culture of dividing plant cells.

20: The method according to claim 19, wherein said dividing plant cells are tobacco BY2 cells.

21: The method according to claim 20, wherein the expression profiles are determined by means of micro-array, macro array or c-DNA-AFLP.

22: The method according to claim 17, wherein said downregulation involves a viral-induced gene silencing mechanism.

23: The method according to claim 22, wherein said downregulation involves the use of infectious DNA of virus is Tobacco Rattle Virus and wherein said plant is tobacco.

24: The method for screening candidate agrochemical compounds comprising the method of claim 17.

25: An isolated nucleic acid identified by the method of claim 17.

26: A method for screening candidate agrochemical compounds comprising using at least one or more of SEQ ID NO 1 to 785 or a homologue, functional fragment or derivative thereof or at least one or more of the proteins corresponding to SEQ ID NO 1 to 785 or a homologue, functional fragment or derivative thereof.

27: An isolated nucleic acid identified by the method of claim 26.

28: A method for the production of an agrochemical resistant plant, comprising using at least one or more of SEQ ID NO 1 to 785 or a homologue, functional fragment or derivative thereof or at least one or more of the proteins encoded by SEQ ID NO 1 to 785 or a homologue, functional fragment or derivative thereof.

29: An isolated nucleic acid identified by the method of claim 28.

30: An isolated nucleic acid, comprising at least part of a nucleic acid sequence chosen from the group of SEQ ID NO 1 to 785 or a homologue, functional fragment or derivative thereof.

31: A method for producing an agrochemical resistant plant, comprising using the isolated nucleic acid or the protein encoded by said isolated nucleic acid of claim 29, wherein said isolated nucleic acid or protein is a target for an agrochemical compound.

32: The method according to claim 31, wherein the agrochemical compound is a herbicide.

33: A plant tolerant to an agrochemical, in which the expression level of one or more of the nucleic acids corresponding to SEQ ID NO 1 to 785 or the homologue, functional fragment or derivative thereof is modulated.

34: A harvestable part of a plant according to claim 33.

The application's sequence listing, which the Patent Office published only in electronic form, follows.

SEQUENCE LISTING (794 sequences)

SEQ ID NO: 1 - DNA, 234 bp, Unknown Organism
  polynucleotide sequence used for validation of candidate target genes
gaattcactagtgattgatgagtcctgagtaaggtgagacgagaagcgaccttctgaccacaagacttgtcagcctgagacaggtatgatatccatatactgcgtatctcataagtgactcgtggatcggataaatgctcaacccatttgctaacatatctgtcttgcctgtcaggttcccaggatcactacgcagtcaatcgaattcccgcggcctatagtgagtcgtattaa

SEQ ID NO: 2 - DNA, 216 bp, Unknown Organism
  polynucleotide sequence used for validation of candidate target genes
tgactgcgtagtgatctcaaagaagtggaagttacgagtgctcgagatgtgatgcagcagcttcttcagggtgctgcaaacagaaaggtagctgcaaccaacatgaatcgtgctagtagccgttcacacagtgtttttacatgtgtgatagagagcaaatgggaatctcaaggagtaactcaccaccggtttgctcgtcttactcaggactcatca

SEQ ID NO: 3 - DNA, 104 bp, Unknown Organism
  polynucleotide sequence used for validation of candidate target genes
  misc_feature (2)..(3): n is a, c, g, or t
  misc_feature (13)..(13): n is a, c, g, or t
  misc_feature (27)..(27): n is a, c, g, or t
  misc_feature (33)..(33): n is a, c, g, or t
  misc_feature (36)..(36): n is a, c, g, or t
  misc_feature (50)..(50): n is a, c, g, or t
  misc_feature (59)..(59): n is a, c, g, or t
  misc_feature (66)..(66): n is a, c, g, or t
  misc_feature (69)..(69): n is a, c, g, or t
  misc_feature (75)..(75): n is a, c, g, or t
  misc_feature (89)..(89): n is a, c, g, or t
gnnatgcccgatntaagccgcccctanatacanttnaaatggtcccgganaccctgggngacaatnatngactgngcagtggttgaagnttgacaattcctatt

SEQ ID NO: 4 - DNA, 216 bp, Unknown Organism
  polynucleotide sequence used for validation of candidate target genes
  misc_feature (2)..(2): n is a, c, g, or t
  misc_feature (4)..(4): n is a, c, g, or t
  misc_feature (8)..(8): n is a, c, g, or t
  misc_feature (10)..(10): n is a, c, g, or t
  misc_feature (36)..(36): n is a, c, g, or t
  misc_feature (65)..(65): n is a, c, g, or t
cncnattntnaataagcccgaaaaagaagaagtaanggagggagaaggcctgaagagaatttgcnggattttctagagttgatacagaagttcttccaaactgttccaccttggattatgacaagtagtgtcaccaaccaaggtcgagatgagatactgttgcacatgtctcagctgcgaaactattggctcaagcattgagttggcatcatatga

SEQ ID NO: 5 - DNA, 264 bp, Unknown Organism
  polynucleotide sequence used for validation of candidate target genes
  misc_feature (6)..(6): n is a, c, g, or t
  misc_feature (8)..(8): n is a, c, g, or t
  misc_feature (11)..(11): n is a, c, g, or t
  misc_feature (20)..(20): n is a, c, g, or t
  misc_feature (35)..(35): n is a, c, g, or t
  misc_feature (117)..(117): n is a, c, g, or t
  misc_feature (131)..(131): n is a, c, g, or t
  misc_feature (157)..(157): n is a, c, g, or t
  misc_feature (163)..(163): n is a, c, g, or t
ttttangncancaaatctcnctctaacggaccctngcatggcttgttcaaaataaatgcctcaggacaataccacgttatgtaatggggagtgaactgcgtatatccgttctgctcntttatctgggcggngcctttgaagtttttgacaaactctntctggntctcacacttagggccacactcatcattactgtttgtccaaaactcgtactcaactctttcatcgggatgtggaagcgcctctctccaatcaaggtttatg

SEQ ID NO: 6 - DNA, 221 bp, Unknown Organism
  polynucleotide sequence used for validation of candidate target genes
  misc_feature (12)..(12): n is a, c, g, or t
  misc_feature (28)..(28): n is a, c, g, or t
  misc_feature (77)..(77): n is a, c, g, or t
  misc_feature (83)..(83): n is a, c, g, or t
  misc_feature (93)..(93): n is a, c, g, or t
  misc_feature (102)..(102): n is a, c, g, or t
  misc_feature (109)..(110): n is a, c, g, or t
cttggatggtcnaccagattgaagaacncgagaaaaagctgttttctcatccacttcataagtcacaaaatgaacancagccnttgagaatcncagctgtgntatgtannttcgaagacattggctgaggatgctgcatggaagtttgtgaaagagaaagcctatcgatatggttacgataaacccagcaatggttattggcggtttgttacaaccaatac

SEQ ID NO: 7 - DNA, 391 bp, Unknown Organism
  polynucleotide sequence used for validation of candidate target genes
  misc_feature (187)..(187): n is a, c, g, or t
  misc_feature (192)..(192): n is a, c, g, or t
  misc_feature (270)..(270): n is a, c, g, or t
  misc_feature (296)..(296): n is a, c, g, or t
  misc_feature (307)..(307): n is a, c, g, or t
  misc_feature (338)..(338): n is a, c, g, or t
cccaagatgaacagtcagtcaagtcgatctcatgccatatttacaattacattggaacaaaagagaatggctaattgctcgacgaacgatgatggtgatgacatattatgtgccaagcttcatttggttgaccttgctggttcagagcgagcaaagcgaactggagctgatgagatgcgtttacganagggnattcatatcaacaggggattgcttgctcttggcaatgtaataagtgcccttggtgatgaaaagaagcggaaagaaggngcacacatcccatacagagatagcangttgacacgtntcttacaggactcacttggaggaaacagcangacagttatgattgcttgtgtcagtcctgctgacaccaatgcagaggagaccc

SEQ ID NO: 8 - DNA, 362 bp, Unknown Organism
  polynucleotide sequence used for validation of candidate target genes
gcggttgatatgtggtctgtgggatgtatttttgccgagatggttcgaaggcaagccttatttcctggtgactctgagtttcagcaactgcttcacatattcaggctgttaggaaccccaactgagaagcagtggcctggagtcagttcactccgcgactggcatgtttatccaaaatgggaacctcagaacttggcctctgctgttccagcattgggtcctgatggcgtggacctcctcacgaaaatgctccaatatgatccggcagataggatttcagcaaaagctgcacttgatcatccatacttcgatagcttggacaagtctcagttttgaggttgcttctacttctaagatcagcc

SEQ ID NO: 9 - DNA, 404 bp, Unknown Organism
  polynucleotide sequence used for validation of candidate target genes
  misc_feature (6)..(6): n is a, c, g, or t
  misc_feature (10)..(10): n is a, c, g, or t
  misc_feature (14)..(14): n is a, c, g, or t
  misc_feature (16)..(17): n is a, c, g, or t
  misc_feature (21)..(21): n is a, c, g, or t
  misc_feature (25)..(25): n is a, c, g, or t
  misc_feature (33)..(34): n is a, c, g, or t
  misc_feature (36)..(37): n is a, c, g, or t
  misc_feature (39)..(39): n is a, c, g, or t
  misc_feature (63)..(63): n is a, c, g, or t
  misc_feature (69)..(69): n is a, c, g, or t
  misc_feature (78)..(78): n is a, c, g, or t
  misc_feature (87)..(87): n is a, c, g, or t
  misc_feature (95)..(96): n is a, c, g, or t
  misc_feature (104)..(104): n is a, c, g, or t
  misc_feature (114)..(114): n is a, c, g, or t
  misc_feature (116)..(116): n is a, c, g, or t
  misc_feature (126)..(126): n is a, c, g, or t
  misc_feature (135)..(136): n is a, c, g, or t
  misc_feature (147)..(147): n is a, c, g, or t
  misc_feature (154)..(154): n is a, c, g, or t
gcagcnagcnaagntnnggtngggnacgccaannanngntgtgcctttgatgacgtcaccagntatcantctacatanaacggaggncttgcgannggcttggntcattctacngntctaggattntcaactctnntcaattcttcnataactnacctattctcctgcagcaatatgtgagacgtaacctagaatattatttgcctttatagatattgacttattctgcttgcatattttatctgcagccggtggcatctaccatcaatacattggctggtgcattgtataaggtgttttgtgcttcacctgatcaagctaggaaggagatgcgcgatgcatgctttgactatttgagccttggtggagtattctccacaggacctgtatctttgctttctggc

SEQ ID NO: 10 - DNA, 179 bp, Unknown Organism
  polynucleotide sequence used for validation of candidate target genes
gtcagtgcttgagctgaacccgttgcttggacttgacaactagcatcttctctttgcatgctgccctcatgtattgccaatgtaatttctcctctagcaaaccattatgtattacaaactattattatgattgtgaataacttgtgaaaagttcaatcaatctgaaagaaataatctct

SEQ ID NO: 11 - DNA, 192 bp, Unknown Organism
  polynucleotide sequence used for validation of candidate target genes
  misc_feature (6)..(6): n is a, c, g, or t
  misc_feature (50)..(50): n is a, c, g, or t
  misc_feature (64)..(64): n is a, c, g, or t
  misc_feature (95)..(95): n is a, c, g, or t
  misc_feature (123)..(123): n is a, c, g, or t
  misc_feature (141)..(141): n is a, c, g, or t
  misc_feature (190)..(190): n is a, c, g, or t
cgttgnttgtttcgggaaattggaacagcattggtgaaggcacttacggncaagtgtacatggntaaagaaattagaacaggggaaattgttgcnttgaagaagatacgcatggacaacgaangagaagggtttccaatanctgctatacgtgaaatcaaaatcttgaagaagctgcaccatgaaaatgnga

SEQ ID NO: 12 - DNA, 198 bp, Unknown Organism
  polynucleotide sequence used for validation of candidate target genes
  misc_feature (11)..(11): n is a, c, g, or t
  misc_feature (31)..(32): n is a, c, g, or t
taaaggaccgnttttgtttcgagaaattggnncagattggtgaaggcacttacggtcaagtgtacatggctaaagaaattagaacaggggaaattgttgctttgaagaagatacgcatggacaacgaaagagaagggtttccaataactgctatacgtgaaatcaaaatcttgaagaagctgcaccatgaaaatgtga

SEQ ID NO: 13 - DNA, 168 bp, Unknown Organism
  polynucleotide sequence used for validation of candidate target genes
  misc_feature (21)..(21): n is a, c, g, or t
  misc_feature (23)..(23): n is a, c, g, or t
  misc_feature (36)..(36): n is a, c, g, or t
  misc_feature (72)..(72): n is a, c, g, or t
  misc_feature (105)..(105): n is a, c, g, or t
  misc_feature (112)..(112): n is a, c, g, or t
  misc_feature (153)..(153): n is a, c, g, or t
  misc_feature (159)..(159): n is a, c, g, or t
ggacgtttgcatttcggattngngcacgagatgttnatgattttaggatttattttagtcatcttactcggntgatgtttattcgtttttgtgacttttactcgngggcggnggtgaccgcgtacatgctatttatttgatttttactatggntattgnttattgtta

SEQ ID NO: 14 - DNA, 152 bp, Unknown Organism
  polynucleotide sequence used for validation of candidate target genes
  misc_feature (5)..(5): n is a, c, g, or t
  misc_feature (17)..(18): n is a, c, g, or t
  misc_feature (54)..(54): n is a, c, g, or t
  misc_feature (73)..(73): n is a, c, g, or t
  misc_feature (89)..(89): n is a, c, g, or t
  misc_feature (99)..(99): n is a, c, g, or t
  misc_feature (107)..(107): n is a, c, g, or t
ttacntttactgagatnnttatgattttaggatttattttagccatcttactcnggtgatgtttattcgattntgtgacttttactcgngggcggtggngaccgcgnacatgctatttatttgatttttactatggttattgtttattgtta

SEQ ID NO: 15 - DNA, 227 bp, Unknown Organism
  polynucleotide sequence used for validation of candidate target genes
  misc_feature (116)..(116): n is a, c, g, or t
  misc_feature (118)..(119): n is a, c, g, or t
  misc_feature (125)..(125): n is a, c, g, or t
  misc_feature (140)..(140): n is a, c, g, or t
  misc_feature (143)..(143): n is a, c, g, or t
  misc_feature (148)..(148): n is a, c, g, or t
  misc_feature (152)..(152): n is a, c, g, or t
  misc_feature (155)..(155): n is a, c, g, or t
  misc_feature (188)..(188): n is a, c, g, or t
tatcaaatggagaagttatcaatatgaaaatagctgtcaagccacttcaactattgctaggaagcagcaaactgtgacgcgagataaacatgacacagaactcattgctaggggtngnnatgatncttgtgtagttcccnaanctgtnccantgntttaagcaatggtagccctggcgctagtggatnagctaatggctcattatgcacagtgtatgctgttcccaa

SEQ ID NO: 16 - DNA, 182 bp, Unknown Organism
  polynucleotide sequence used for validation of candidate target genes
ttgaagagtggaagttacgagtgctcgagatgtgatgcagcagcttcttcagggtgctgcaaacagaaaggtagctgcaaccaacatgaatcgtgctagtagccgttcacacagtgtttttacatgtgtgatagagagcaaatgggaatctcaaggagtaactcaccaccggtttgctcgtc

SEQ ID NO: 17 - DNA, 338 bp, Unknown Organism
  polynucleotide sequence used for validation of candidate target genes
gggcccgccaccaccgcaaccacctagttattcctccgtcgaacacgtgtctcacgagagtgagagtgagagcgttcatcgtcagcatgatcatcatcgttttcaaccacatgtgccttcattcttccaccatgagacctcaccacatccagagctcatcgataagccttcatttagggtttatacaaaggctgatcccaattactctctcactatccgtgacggcaaagtcgttcttgcctcttctgatccatccgatccttttcaacactggtataaagatgagaagtacagcactaaagtgaaggatgaagaggggtttccaagctttgctctgg

SEQ ID NO: 18 - DNA, 253 bp, Unknown Organism
  polynucleotide sequence used for validation of candidate target genes
  misc_feature (3)..(3): n is a, c, g, or t
  misc_feature (5)..(5): n is a, c, g, or t
  misc_feature (23)..(23): n is a, c, g, or t
  misc_feature (39)..(39): n is a, c, g, or t
  misc_feature (53)..(53): n is a, c, g, or t
  misc_feature (56)..(56): n is a, c, g, or t
  misc_feature (82)..(82): n is a, c, g, or t
  misc_feature (93)..(93): n is a, c, g, or t
  misc_feature (102)..(102): n is a, c, g, or t
  misc_feature (126)..(126): n is a, c, g, or t
  misc_feature (149)..(149): n is a, c, g, or t
  misc_feature (188)..(188): n is a, c, g, or t
  misc_feature (198)..(198): n is a, c, g, or t
  misc_feature (205)..(206): n is a, c, g, or t
gtntntgtggcccacctgctgcnagagtgacacacaggnatgatcttagagcngcnattcagaagatgttagacactcctgngccatacttgntggatgtgnttgtacctcatcaggaacatgttntacctatgattcccagaggcggngctttcaaagatgtgatcacagagggtgacgggagaagntcctattgantttgagnngctacagagctagttctaggccttgcattatctaaaataaacttcta

SEQ ID NO: 19 - DNA, 553 bp, Unknown Organism
  polynucleotide sequence used for validation of candidate target genes
gcaaggagtcaagtggatattttggatgatggttatagatggaggaaatacggacagaaggctgtcaagaacaacagattcccaagaagctactaccgatgcacgcatcaaggatgtaacgtgaagaaacaagtacaaaggctgtcaaaggatgaaggagtagtagtaactacttatgaaggcatgcattcacatcccattgagaagtccacagataactttgagcacattttgactcagatgcaaatctatgcttccttttgaaacgtccatcacttcaatgcctaaggcatgacactcaattagtcacttgtaaaatagtactacagtatattgtgtacatgcgttttgaacctagatgctatattttgaaataaaacgcaacttcattagggaatttaatttgatcattgtacaactaaaagtaatgttgctatttttttgtttttatcactttgtttttgccggagccatgctcttcattttaactcttttcttttagaattaacaaataatttcatgttggagaaagatacgtgccaaaaaaaaaaaa

SEQ ID NO: 20 - DNA, 248 bp, Unknown Organism
  polynucleotide sequence used for validation of candidate target genes
taatggacacggatctgcaccagataatacgctcttcacaagcactgacagaagatcactgccaatactttctctatcaattattacgtggactcaagtatgtacattcagctaatgtcctccaccgggatctgaaacctagcaacttactactcaacgcaaactgtgacctcaagatttgtgattttgggctagctagaaccacttcagaggcggattttatgactgagtatgttgtcacccgctgg

SEQ ID NO: 21 - DNA, 328 bp, Unknown Organism
  polynucleotide sequence used for validation of candidate target genes
  misc_feature (16)..(16): n is a, c, g, or t
  misc_feature (30)..(30): n is a, c, g, or t
  misc_feature (34)..(34): n is a, c, g, or t
  misc_feature (58)..(58): n is a, c, g, or t
tttgcagccacctttnacatttcggtagangatntgtccataacaagcctgacttttntaaaggaatttacagcttcaattgaagcaaaacaagtggctgctcaagaagctgaaagagcaaagtttgttgtggaaaaagctgagcaagataagcgaagtgctgttatcagagctcagggtgaggctaagagtgcccagcttattggtcaagcgattgccaataatccggcatttatcacactcaggaaaatcgaagcagcaagagagattgcccagactatctcacatgcagcaaacaaggtgtacttgagtgccgatgatctgttgc

SEQ ID NO: 22 - DNA, 2527 bp, Unknown Organism
  polynucleotide sequence that is cell cycle modulated or involved in the cell cycle process
ctgaaccctaacgcacacaacttcactctttgctcctccaaatctctctccaatgcaggatttcatcggctccgttcgccgatctctggttttcaagcagtccggagacttcgataccggcgctgccggtgtcggcagcggattcggaggcttcgttgagaaactaggttcgagcattcgcaaatcgagtattggaatcttctcgaaagctcatgttcctgctcttccgtctatttctaaagctgagctgcccgcgaaggctcggaaagatgacactccgccaatccggtggaggaaaggtgaaatgattggatgtggtgcttttggtagggtttatatggggatgaatgttgattctggagagttactcgctataaaggaggtttcgattgcgatgaatggtgcttcgagagagcgagcacaagctcatgttagagagcttgaggaagaagtgaatctattgaagaatctctcccatcccaacatagtgagatatttgggaactgcaagagaggcaggatcattaaatatattgttggaatttgttcctggtggctcaatctcgtcacttttgggaaaatttggatccttccctgaatctgttataagaatgtacaccaagcaattgttattagggttggaatacttgcataagaatgggattatgcacagagatattaagggagcaaacatacttgttgacaataaaggttgcattaaacttgctgatttcggtgcatccaagaaggttgttgaattggctactatgactggtgccaagtcaatgaagggtactccatactggatggctcccgaagtcattctgcagactggccatagcttctctgctgacatatggagtgtcggatgcactattatcgaaatggctacaggaaaacctccttggagccagcagtatcaggaggttgctgctctcttccatatagggacaaccaaatcccatccccccatcccagagcatctttctgctgaatcaaaggacttcctattaaaatgtttgcagaaggaaccgcacctgaggcattctgcatcaaatttgcttcagcatccatttgttacagcagaacatcaggaagctcgcccttttcttcgctcatcctttatgggaaaccccgaaaacatggcggcgcaaaggatggatgttaggacctcaatcattcctgatatgagagcttcctgcaatggtttgaaagatgtttgtggtgttagcgctgtgaggtgctccactgtatatcccgagaattccttagggaaagagtcactctggaaactaggaaactctgatgatgacatgtgccagatggataatgatgattttatgtttggtgcatctgtgaaatgcagttcagatttgcattctcctgctaattataagagttttaatcctatgtgtgaacctgataacgattggccatgcaaatttgatgaaagtcccgagttgacgaaaagtcaagcaaacctgcattatgatcaagcaactattaagcccactaataaccccatcatgtcatacaaggaggatcttgctttcacatttccaagtgggcaatctgcagccgaggatgatgatgaattgacagagtctaaaattagggcattccttgatgaaaaggcaatggacttgaagaagctgcaaacaccactatatgaaggattctacaattccttgaatgtttccagcacaccgagtcccgttggcactgggaacaaggaaaatgttccaagtaacataaacttaccaccaaaaagcaggtcaccaaaacgtatgcttagcagaaggctctctactgccattgaaggtgcttgtgctcccagcccagtgactcattccaagcgaatatcaaatattggtggcctaaatggtgaagctattcaggaagctcagttgccgaggcataatgaatggaaagatcttcttggttctcaacgtgaagcagttaattcaagcttctctgagaggcaaagaaggtggaaagaagagcttgatgaagagttgcaaaggaaacgagagattatgcgtcaggcagtcaacttatcaccaccaaaggatccaattctaaatcgatgtagaagtaaatcaaggtttgcatctcctggaagataaatgtatgtacttgtgtccctaaactaaagtcagtttgaagaatataattaatgatcctgcaaccccagaacagagagttagatgtcttgagcaggtatacgaacgtgaggttttcttgacccgttactacaggaatatcagcgcttgtcagatagagtgagctgttactacaggaatatctgtcaacctgttaatcatattataaaatgccaataatttgcgttgtattcgttttgatcattctcctgagagcattgtaagaaaaatgcaggcctttttataacctatataagtgctctctcatggtagttgccaatattaaaacgcagagaaaagtcgagttctcatctgctgaattgtttgtaaaatgtgatatattaatgtatttaccgtcttacaacc

SEQ ID NO: 23 - DNA, 1085 bp, Unknown Organism
  polynucleotide sequence that is cell cycle modulated or involved in the cell cycle process
ccacgcgtccgtgatatgggatgtcacattgatggatttattgctgtagttggacatacacatgttcttcacgaaggaccagttactggtagacctgctgacgtcattgcagctgctaatacagccgctgaagttgctttgaggcttgtgagaccaggaaagaagaactcggatgtaacagaagctattcagaaagttgctgctgcctatgactgcaagattgttgagggtgtcttgagccatcaaatgaagcaatttgttattgatggaaacaaagttgtattgagtgtgaccaatcctgaaacgagagtagatgaagcagaattcgaggagaatgaggtttactccattgatattgtgacaagcactggtgaaggaaagccaaagttgttggatgagaaacaaacaactatctacaagagagccgtggacaagagctataacctgaagatgaaagcatcaaggtttatcttcagtgaaatcagtcagaagttccctatcatgccatttaccgcaagggatttggaggagaagagggctcgtctgggcctagttgagtgtgttaaccatgagcttttgcagccatatcctgttctacatgagaaacctggtgatttggttgctcacattaaattcacagtgctgttaatgcctaatgggtcggataggattacatctcatgctctccaggagctgaagcctgcaaagtcgatagagaatgaacccgaaatcaaagcctggcttgcccttcccgttaagaccaagaagaaaggcggtgggaagaaaaagaaagggaaaaaaggtgacaagacagaagactcatctcaagctgagccaacggaaggatagagaaatggtttcaaatcttgataaatagcaattttgaggtgcttgatcgatcaacttcactgaaactattggttcactgttggtcggcactttcagctgcctttgttcttccttgtggggctttgctatacaagggacagacagttattgtcctcttgtactgtcatgttaaattactcagttttccaatgctattcaacatgctctcaatcggtctttaaaaaaaaaaaaaaaag

SEQ ID NO: 24 - DNA, 1530 bp, Unknown Organism
  polynucleotide sequence that is cell cycle modulated or involved in the cell cycle process
ccacgcgtccgcaaaaccctagctcaaatcccgtttgcctccattttcattccatcaacaaaaacctaagtttatactcagcttgagacatttgataactatgtcggacgacgagagagaagagaaagagttggatctgacaagtcctgaggttgttactaagtacaaaaatgctgctgaaattgttaacaaggctctgcagttggtggtgtctgaatgcaagccaaaagcaaagatagttgatctttgtgaaaaaggagatgccttcatcaaagagcaaactgggaatatgtacaagaatgtgaagaagaaaatcgagaggggtgtggcatttcccacctgcatttcagttaacaataccgtgtgccatttttctccactgtctagtgacgagacagtattggaagaaggtgatatggtgaagattgatatggggtgtcatatagatggctttattgctgtagttggtcatacacatgtgctccaggaaggaccagttactggtagagcagctgacgttgttgcggctgctaatacagctgctgaagttgccctgaggcttgtgagaccaggaaggaagaactcggatgtaacagaagctattcagaaagttgctgcggcatatgactgcaagattgttgagggtgttttaagccatcaaatgaagcagtttgtgattgacggaaacaaagttgtgttaagtgtgtccaatcctgaaacgagagtagatgatgcagaatttgaggagaatgaggtctattcaattgacattgtaacaagcactggtgaaggaaagccaaaattgttggatgagaaacaaacaaccatctacaagagagctgtagataaaagctacaacctgaagatgaaagcgtcgaggtttattttcagtgaaatcagtcagaagtttcctgtcatgccatttacagcaagggatttggaggagaagagagctcgtttgggactcgttgaatgtgttaaccatgagcttttgcagccctatcctgttctacatgagaaacctggtgatttggttgctcacataaaattcacagtgctgttgatgcctaacgggtcagataggatcacaactcatactctccaggagctgaaacctgctaagacaatagaggatgaacctgaaatcaagacctggttagcccttcccgtaaaaagcaagaaaaaaggcggcgggaagaaaaagaaagcgaagaaaggtgagaagacagaagactcatcccaagctgaaccaatggaaggagaatcaaatggtgctgaatcttgatatgttgctagaactttgatttgattcaattccaagaactatttgttgattgttagttaaatgtgggatattgaggtagttgtggatctttctttgcggcattttgcaatacaagaatggcatggacagttgttgtccttgtcttgacacatttgtcatgctggaattattaagtggggtttccaatgctataatgtcatgtgtatcaaaaaaaaaaaaaaaagggcggcaactctagagtatca

SEQ ID NO: 25 - DNA, 2231 bp, Unknown Organism
  polynucleotide sequence that is cell cycle modulated or involved in the cell cycle process
ccacgcgtccgcttggggattagcaggttgtcgacaaagaaaattcatttgtttcctacgatcacacaagtcgtggttgttgcagatccgctttcgctaaggggaaactcaaaagcccagttcgtgtagttcatccaaagatgagttccagcaaaagggttgggaagtcttctaattcatcaggaaagcagaaagctatatgcgaaacaactactacaccaacggttgatgatataaatgtaggcgtagaagatatggggttgaactccgatcaaaatgatggatggatagtgtgttctagaaagtccaagaacaagggtggaagcagcagtgctggaatgaagcaatggatttctcagaatcccactccaaaagccaaactgggaatgcgtaacaatattgttggatcatcaggacaggggtctaggaataactggtccacacctaattatcatcctcgaaaacctgctggcagagaatgctacacaccgacacccgctgcagttcctcctgccctgaagaatggttgggattggtcatctgtcgctcgttccaatgaggaccatgatacttattcccctgtcgctgatgtcaaggcttcctgtgaacatgatggagaggataatgaatcggatttgcctgatgatgacagtgatgatgagcttccgagtgatgacgactttgatgatcactcggatgtaaatgaaatgagtcatgaggtactcaaggaaagtcgttggttcaagaaccttttcaaatgtcttgacagtttgactgtcactgagattaatgatccggaaagacagtggcactgccctgcatgcaaaggtggtccgggtgcaattgagtggtttccagggatacagtcagtgatgaaccacgcaaaaacgaaaggatttaggatgaaattacacagacaacttgctcaacttttggaggaagagctgcgtcggaggggaacttctgttgtacctccaggtcaagtgtatggaagatggggtggcggtgaatatgaagataaggaaatagtgtggccaccgaccgcgattatcgtgaacacagtgcttgagaaagatgaaaatgacaagtggattggaatgggaaatcaggagctgcgtgattatttcagctcttatgctgctgtcaaggcagcgcgaagctcatatggtccacaaggccatcgtggtatcagtgtgttgatttttgaggccactcccgtgggatacatggaggctgtacttctcagtgagcagttttctgaaaaaggaagtgatagagatgcatgggaacacaatccagttctcttttatcctgggggaaaacgtaagctttatggttacatggcagagaaaagagacatggacaactttaaccggcattcacatgggaaatcaaggctgaagttcgagatgaggtcatataaagaaactgtttcgaatccagcgatgcagatgtcggaggataatcaacagctcatatggttcaagaaccaagcctctaagcaccaaaagcgggctaaagctactgaagagtctctaagactggtgagtgaaaagcaccgtcagacagtcgaagagaacaagattgtcagactgagaactaagatgcaccatgaacggaacaaggaagagatggaatatctagagcagttttttaatgatcagttgaaaatgatttatgatgccaggactgctgaggaggacaagtttgaaaagatacagcaggaacagcgtgagatgatctatcaatctaatgcaactatttcctcggctgaggatcatcgactcagggcagagaaagttgcgaaatttatcaaacttcaggacaaggatatggaagaatttgtggaagagagggataatctgataagagctcatgaagatagggtaggttcaatgagacgcaaatacttgctgcaatactcggaagaggcagttgcacttgagaagaattttgatctcgaactggctaagctgatggagaagtactcatcaaagcaatctgagcaggtcaacagcagtgatgccgtgtgaccctatagtaatactattcaagcgccgttttagctttaaatttctgtgaacttgggattcttcactgacttttataatcctggtctgtccatgtgttttgatgatgctaaagaaatgattctaatagttatattatatcctaaaacatatggcttgaactatttgttctagaaaaaaaaaaaaaaaaaaagggcggcc

SEQ ID NO: 26 - DNA, 2032 bp, Unknown Organism
  polynucleotide sequence that is cell cycle modulated or involved in the cell cycle process
ccacgcgtccggccatggtagcaaaacagttagctgatgacgaaccacaaaaaaccctcaaggattcaccaaagtttgaatccaaatcccataagaaaaaacataagagaaagctcgaagaccctgaacctgaagaagttactgttatagagtccaagaaagagaaaaagaagaagaaaaagcagaaacagaaccaagaacaagaagggtctattgtaaacagtgaaaatcttagtgggtctaatggcaaggttgaaactattaatgggtcagctgagttctctgaaaaaagtagtacaaatgtggtggtaactggtaaggatgctaatgagtcaaagtacaaagctttagcaaaatttgtggattcagggcttccaagtgatgtgttagattgttgcaagaattttgagaaaccatcaccaattcaatcacattcatggccttttcttttagatggccgtgatttcattggaattgccaaaactgggtcaggtaagactttggcttttggtattccggctattatgcatgtcctgagcaagagaaagagtaaaaagtctaagaatccgctttgcctcgtgctttcgcctacaagggagctagctcaacaaatatcagatgttctctgcgatgctgggaagcctactggtgtgcagtcagtttgtctatatggtggagtcgataagcatcatcaaaaagcttctcttaaatctggtgtggatattgttattggaacccctggtcgtttgcaggatatgatggaaatgggagcatgcaacttaaaagcggtttcttttgtggtgctagatgaagctgatcggatgctcgatttaggttttgaacctgctgtccgtgccattttgagccaaacatgctctgttcgacaatcggttatgttcagtgctacatggcctccggctgttcatcaattagctcaagaattcatggatcctcatccaatcaaggtagttgtaggttcagaagatttggctgccaaccatgatgtcatgcaaattgtcgaggtcttggaagatcgagcccgtgatgagcgtttacagtgcttgctggaaaaataccacaagtttagaaagaacagagtattggtttttgttttgtacaagaaggaagcatctcgggttgaaattatgctacagaaaaggggttggaaagttgtgtccattagcggtgacaagcaacaacatgctcgtactaaggcgttgtcactctttaaggatggaagctgtcctttaatgatagctactgatgtagctgctcgaggtctggatatcccagatgttgaagttgtgataaattatagttttcctttgacaacagaggattatgttcatagaattggaagaactgggcgagctggtaaaaaaggtgtagctcatacattcttcactaaggacaacaagggactttctggggagttgataaatgttctcagagaggctggacaggttgtgccagctgcccttcttaattttggaacccatgtaaagaaaaaggaatcgaagctctatggtgctcattttagagaaatagatgcaaatgctccaaaggctacaaaaataaaatttgacaattctgatgaggaagattgagaagcaatatcattattaccaaagcaacacaactccattgaattggctcatcatcctgacattccgtgcaatcatttggcggatacatgtagaagtggattactgcgggaagaatgcaagagatatctcactgctcatgtatatggtaattgaagcttaaatctattggcgcttcaacctgtcatagataatgagtttgaaatactattgtgtttttgtaccttaatattcttttcacccatacagttggcttagtaaggtttttctaggatccaaatgtagtaatacacttattataatttgcccttttaagtgatgtatgtatgattgcaccttccaaattactgcacttggcaaaaggtggaaaaatattcgaaaatgagattcaaaactggttcatgcaaaaaaaaaaaaaaagggcggcc

SEQ ID NO: 27 - DNA, 1462 bp, Unknown Organism
  polynucleotide sequence that is cell cycle modulated or involved in the cell cycle process
ccacgcgtccggtggaacgccacgttgccattctctcttcggtgacaagcttcaaacgccaggcgtctctctcgtatctgagtgctggtgttttttcttctcaggttcaagttccggcagttaatgcggcaaattcaaatttagatgttatgcaatagctgcgtaagatttgtgttttttcaagcagcacatattgatacacacattgtgcaaaggcaatttatcaaactcattaaaagtttgaatgcaactcgtagcataagttattcttggaatagtgtatatacagcaaggagaacgatgatggtggatactggagcaactgctaaaggaggacctgtcgttgatgtttcaccggagaaggatgataataatggtggtttcgctagcggaggatggaagagtgaagatggaagactgagttgtggttattcaagctttagagggaaaagagccaccatggaggatttttatgacattaaaacttggcaaagttgatggacaaacaggtagcttatttgggatatttgatggccatggtgactctcgcacagctgagtttctgaagaaacatctctttgagaatctaatgaaacatccagagttcccaacgaacgccaagctggccataagtgaaacatatcaacaaacagacatggacttcttagattctgaaaaagataccttccgagatgatggttccactgcttcaacagcagttctagttggtaaccatctctatgttgccaatgttggagattcacggactataatatcgaagggcggaaaagcaattgctctttctgaggatcataagcccaatcgaactgatgagaggaagagaattgaaagtgccggaggtgttgtgatgtgggctggtacctggagagttggtggtgtattagcaatgcacgtgcttttggcaaccgtatgttgaagcaatttgttgtggctgaacctgagattcaggatcaagagattgatgaggaattagaactactcgtgcttgccagcgatgggctctgggatgttgtaccaaatgaggatgctatttcacttgcacaagcagaagaagaaccagaagcagctgctaggaagctaacagaaactgcatttactcggggtagtgctgacaatattacctgcatagtggtgaagtttcaccacaagaaggttgaaccagaggggagccagcaaggttgaagaatttgttgatgctgcatctgccttttcctggtggaaggctgcttcaatgatgccggtgcaagttgctgacgatagcatcacaggggctgtcattttttcattcatttctttgcattgtttttccccgtcatcctgtttaactgttgtatttaaggtgtctgcgtttgtgcgtctgctttctccttttctgtagaggtattgtctggataaactttactgtgaaacgtagttaaaaggttaaaaaaaaaaaaaaaag

SEQ ID NO: 28 - DNA, 925 bp, Unknown Organism
  polynucleotide sequence that is cell cycle modulated or involved in the cell cycle process
ccacgcgtccggaagaaatggttgaattcatggaaaaggtcttcaactccctcggctcagaagaactcaccgtggaggaacgaaacctcctctccgtcgcgtacaagaacgtgatcggagcgcgtagggcatcgtggcgtattatctcatcgattgagcaaaaggaagagtccagagggaacgaggaacacgtaaactctatccgcgagtacagatctaagattgagaatgaactctctaagatctgtgatggcattctgaaattgctcgatgcaaagcttatcccttctgcagcatctggtgattctaaggtgttttacctgaaaatgaaaggagattaccaccgctatttggctgagttcaagaccggtgctgaacgtaaggaggctgctgagagtactctcactgcctacaaagctgctcaggatattgcaactactgagcttgccccaacacatcccatccgacttggactggctcttaacttctctgtgttttactatgagatcttgaactctcctgaccgcgcttgcaatcttgctaaacaggcctttgatgaagcaattgctgagttggacacactgggcgaggagtcttacaaggatagcactttgatcatgcaacttcttcgtgacaatctcactctctggacatctgatatgcaggatgatggggctgatgaaatcaaggaagatcccaaacctgatgaagccaaaaattgaaggaattgaaactctctaatttgcttttcacttcttcctggttgtttttattggaagaagctgattatcgtaatttcctttactattatggttttccgctagggggttgtcttattggaaatgaacaacttttaatattgatgtttcagaagttccatctttaatttaatgtggtttttctggtggtaaaaaaaaaaaaaaag

SEQ ID NO: 29 - DNA, 2875 bp, Unknown Organism
  polynucleotide sequence that is cell cycle modulated or involved in the cell cycle process
ccacgcgtccgctactgtttcttcatcgctatgccgtcagttccgcttcctacttgactgaatctgccgccatggaaggggatatctacacatctaactgcagaattgttacataaacactgatgggaatgcagaagagatattctcaaatattcaaggtagcattttgaaaaatgtcagatgatatggtcattcattttgcatccaattcttcaaaccaatcagaccagtctctgcccacaaagattgctaaacttgaggcaagaatggtgggcaaagcctcatctacatctacatcccgagctacttcctggtctgccccagccaagtttgggcttgggcctgggcctgctgacaatgttgctgagcttgctgtctctagtgattctgatgatgatgatgataatggaagggaatttctcatacaagcaaacactcagaagcggcgcaaactcgaggatgacaacagctcaacttcatttgaacatgtggagacagcagctgatactgtgaaaaagatagtagacaatacagacacaagcaaagtgggttcagatgtgaatagacggaaacaaagccgtgtcaagggacaaactaattctggtagaggacgtggttcccgagttagtgatcagaccaagtcacaagcagtttctgtgtcaaatggtcagctcgagaactcttaccagaaggatggtttgccaaaagagcaaattgggcacgatcgacagactgtattcgaagaggagatcacttctttacgggcaaaagttgtggctttggaggaagagcttaagaaatcccgtcaagaggcatcagattatcaacatcagtgtcaacagctggaaaaggaattgaaggatcttaaagattatgagcagcagacaaagccaaagagaacgaaaataatatctgaattgttaatatctgtttcaaaagctgagaggcaagaggcacgaatgaaagtgcgacaggaatctttgagactgggcaacgtgggagtaatcagagctggaaccattatttctgaggcctgggaagatgggcaagcactaaaggacctcaatgctcagcttagaaacttattagaaactaaagaagctattgaacggcagcgtaaattgctcaagaaacgacaaccagataaaagtgatggaggagatgtggagggaggtttgcaggaagaagattctctcattcaggatgagatctacaaatctcgtttagccagcatcaaacgtgaggaagatgtgataatgcgtgagagggaccgatatgaactagagaaaggaaggctaattcgtgaaatgaaacgcatacgtgatgaagatggttctcattttaacaattttcagattttgaaccaccgatatgccctcttaaaccttcttggaaaaggaggatttagtgaggtgtacaaggctttcgacttggtagaccatagatatgttgcatgtaagctacatggactaaacgctcagtggagtgaagagaagaagcaaagttatatacggcatgcaatcagggagtacaacatccacaagactttggtgcaccatcacattgtgcggctttgggacatttttgagatagaccaaaacaccttttgcactatcttggagtactgtagtggaaaggaccttgatgcagttctcaaagcaacacctgtgttgccagaaagagaagcaagaatcatcattgtgcagatttttcaaggccttgtctacttgaataagaagtcacagaagatcatccattatgatttgaagccaggcaatgttttatttgatgagtttggcattgctaaggtcactgattttggccttagcaagatagtggaggatgatgttggatcccaggggatggagctaacatcccagggagctggaacgtactggtatctacctcctgaatgctttgagctaagcaagacacctcttatatcctcaaaggttgatgtctggtcagctggtattttgttgtaccaaatgctgtttggcaaacgtccctttgggcatgaccagtcacaagaaagaatactaagggaggacacaattattaaagcaagaaaggttgaattccctacacgaccagctgtctctaatgaggcaaaggagttcattcgtcgttgtttaacatataatcaagcagataggccagatgttttaagtattgctcaagacccttacttgacatactcaaagaaatgataggaggatgttaatcccaactacttggacagagggtattgggacgaggattggtgctcaaaggaattttgtatagttgtaaagccatgtaattttttgtccctgtaccttcgactagagtggggcggctcaaggggagctttgctttaggccccaaaattttgggggcatttgcatctatacccagtttttgggttaacttttaacttatatccgcattgcaaaaaaaattgcaagcatacctacttttcgggtaacttcagacattcgggtctgaagtagcaaaaatttatgtctgaagtttgaacttcagaatgttttgcctgaagtgtagtaaaacttcagatatttttgcctgaagtttggcctgacttgcaaagtcaatcacgcaaacttcagttcatagtgcaatggcaaacttcagctcaataaaattacagcatgttttggctgaagtttttgttttgtaattgttgaacttcagcattttaggaactgaagtttgttttgtaattgctgaactttagcattctaggggtgaagtttgttttgtatttgctgaacttcagcattctaggagttgaaatttttgtttatatttgctgaacttcagcattcttagagctgaagttctaagtctgcacacggaaatgaggaagataacc

SEQ ID NO: 30 - DNA, 2371 bp, Unknown Organism
  polynucleotide sequence that is cell cycle modulated or involved in the cell cycle process
ccacgcgtccgacgaaatccaaccgtcgaatctcaggcaacaggcggcagctcatttcaccgctgtaacaaaaattcgagagaatggcaatggtagatgagccattgtaccccatagccgtgttaatagatgaacttaagaacgatgatatacaattacggttgaattcaattaggaggttatcgactattgcacgtgcccttggtgaggaaagaactcgaaaggaattgatcccttttttgagtgaaaacaatgatgatgatgatgaggtgttattggcaatggctgaagagcttggtgtgtttatcccttatgttggaggtgtagagcatgctcatgttttgctcccgccgttggagacgctttgtactgttgaggagacctgtgtgagggataaagctgttgaatcgttgtgtaggattggatctcagatgagggagagtgatttggttgattggttcgtccctcttgtgaagaggctggcagctggtgaatggttcacagctagagtttctgcctgtggactctttcatattgcttactcaagtgccccagagatgttgaaggcagaacttcggtctatttacagtcaattgtgtcaagacgacatgcctatggtgcgaagatcagctgccacaaacttggggaagtttgctgctactgttgaatctacttacctcaagagtgacatcatgtcaatatttgatgatcttacacaggatgatcaggattctgtacgcttattagctgttgagggctgtgctgcacttggcaagctgttggagccccaggattgtgttgcacacatcctgcctgtcattgtcaacttctctcaggacaagtcttggcgcgtccgctacatggttgctaaccagttgtacgaactatgtgaagctgtagggcctgagcccactaggacggatttggtgcctgcctatgtccgtttgcttcgagataatgaagctgaagttcgcatagctgctgcagggaaagtcaccaaattctgtcggattcttagtcccgagcttgctattcagcatattcttccctgtgtgaaggaattatcatcagactcttcacagcatgtcagatctgctttggcttctgttataatggggatggctcctgttttgggaaaggatgcaaccattgagcatcttcttccaatatttctttcccttctgaaggacgagtttcctgatgtgcgcctgaacatcattagcaagcttgatcaagtcaatcaggtgattggaattgatttattatcccaatctttgttgccagctattgttgagctagcagaggacaggcattggcgagtccgtcttgcaataatagaatacatacctctattggcaagtcaattgggcataggattttttgatgataagcttggtgccctttgtatgcaatggttacaggacaaggtttattcaatcagagatgctgctgctaataacctaaagcgtcttgcagaagaatttggtccagagtgggcaatgcagcatataattcctcaggtcttggatatgactaccagtccacattatttgtatagaatgacaattcttagagcaatttcattgcttgcacctgtaatgggctctgaaataacttgttctaaattgctgcctgtggttattactgcaacaaaggatagagtgcccaacattaaatttaatgtggcaaaggtgttgcaatcccttatacctattgttgaccactcggtggtggagaaaaccattcgccctagtttagtagagctagctgaagaccctgatgttgatgttcgcttttatgccaatcaagcacttcagtcaattgataacgtcatgatgtcaggctagagaatataactgtggtgagagtactacaaatctctcttcaaatccctctttggtaggattttgctctcacacgaagacgcaaaagagaaaatgtgcaagcaaaatgcattctgttgagcttggagtcgtatattgttactaattcttttgtaggatttgacattcaagatgctgtgacactaatgaacaccgagtgttttttcatgtaaagttactgccgtactatttagatctgctaagctcatgtatttgcttttgttagtgtacttttttggtgtttgaacttacaactttttacctgcgttattctagcagatttgttgcgtttacattagcgtttgcgtttcttcctagccgatgttatgtttgagcagtgcccccgccaccctctctttttctcaggtcttatgctttctatgtgttttttcatgccgatagaatgtatgtggaacttttagtacttattattttttatgttgtatttgttggcttgagatgagcaacataaataataagaaactggg

SEQ ID NO: 31 - DNA, 1171 bp, Unknown Organism
  polynucleotide sequence that is cell cycle modulated or involved in the cell cycle process
ctgtacaaaaaagcggctggtaccggtccggaattcccgggatatcgtcgacccacgcgtccgaggagattgagctgagctgactcaatgtttccgagattgattcaaccacaaggggaagatgaatataatatgaatgttgggattcatcatactcataatattaatggagatccttgccttgtgctgacgtcagatccgaagcctcgacttcgttggactgctgaccttcacgaacgcttcgttgatgctgttactcagcttggcggtcccagcaaagctacgccaaaggcgataatgcggacaatgggtgtcaagggactgaccctcttccacctaaagagtcaccttcagaaatacagactaggacttacagctacatattcattagagagcccttgttctggtggtactcctcagcagttgccggcatcggacttgaatgaaggttatgaagtcaaggaggcattgagagctcagatggaagtgcaaagtaaattgcacctgcaagttgaagctgagaagcacttgcaaattcggcaggatgctgaacaaaggtatattagcatgctggagaaggcctgtaaaatgcttgctgatcaattcattggtggtgtagttactgaaaatgatcaagagacttgccaaggattaggaacaaggacacaagttagccctctttgtaatccacttggattatgcccctcggaatctgctgatcttgttggaatccatggtccagaagaagtttcccccagaatccatccacaattcaccgattgttccactgaaagctgcttaacttcgcatgagagtcctgctggacttcccctagaaggaacttcacctggaggaagaaaacgagggccgaatggagattcaacacatgcatcagttgttggggtgaagcagatatgatatcgtcaggtgttcgtctgcttcaagttaatcgctttgggattactagctctaatgttcaaaatgtctcttcttaagagattagtgctgagtttatctacagccattgattctcaaactgcatattgcggtttctgggaatactgatgggccttggacttgtcaagttgtaaatgcaagctgatgactttctaactctaactgcgccccctgaacattaaatcctaaaaaaggaagaaaattgagatgcgag

SEQ ID NO: 32 - DNA, 1101 bp, Unknown Organism
  polynucleotide sequence that is cell cycle modulated or involved in the cell cycle process
agcggctggtaccggtccggaattcccgggatatcgtcgacccacgcgtccgaaagaagagaaaaagatgggtgctgacaaagggaagaagcaaaaagtggaggaagagaacaacaccattgatggtgagctcgttttttccattgaaaaattgcaagaaatacaagacgagctcgagaagatcaatgaggaagcaagtgataaagtattggaagtggaacagaagtacaatgagatccgcaagcctgtctatgacaaacgaaacgacatcattaaagctatcccggacttctggttgactgcttttttgagtcatcctgtcctaggtgaacttctaactgaagaagaccaaaagatcttcaagtttctaagttctattgaagttgaagactctaaagatgtgaagtcgggctactcgataacctttaacttcaatgcgaatccttattttgaaaatacaaagctcacaaagacctataccttccttgaagatggacccacaaagatttctgctacaacaataaaatggaaagaaggcatgggcattcctaatggatttgcacatgagaagaaaggaaacaagcgatctcatgctgaggaaagcttcttcacatggttcagtgaagtcaatcaaaaagatgaggatgaggatgaggccctagagattcaggatgaggtcgctgacataattaaggatgacttgtggccgaaccctctcacctattttaacaacgagcctgatgaagaagattttgatggtgacgagggaaaggacagtgaaggctctgaagacgaagaggaagaagaagaggaggatgaggatggtgatgaagaatgaaggcagtaaactgttcaagacccctattttgggatctcgtcttcagcggttttaatcatcagggtttaatgtctgtaaagaggctttgaatgttgccaaagaacagaataactgtggtgactataccttttcttctcttgtatggttataacttataagcaaaatatctaattccggaggttccaaaatgttttcattaggctagttcgattaatgaagtgtttgtctggcaaaaactgataatgttaggttattgagttatg

SEQ ID NO: 33 - DNA, 2130 bp, Unknown Organism
  polynucleotide sequence that is cell cycle modulated or involved in the cell cycle process
ccacgcgtccgcccacgcgtccgggcagctcatttttaccgccgtaacaaaaactcgagagaatggcaatggtagatgagccattgtacccaatagccgtgttaatagacgaacttaagaacgacgatatacaattgaggttgaattcaattaggaggttatcgactattgcacgtgcactcggtgaggaaagaactcgaaaggaattgatcccctttttgagtgaaaacaatgatgatgatgatgaggtgttattggcaatggctgaagagcttggtgtgtttattccttatgttggaggtgtagagcatgctcatgtcttgctcccgcctttggagacgctttgtactgttgaggagacttgtgtgagggataaggcggtggaatcgttttgtagaattggatctcagatgagggagagtgatttggttgattggtttgtccctctcgtgaagaggcttgcagccggtgaatggttcactgctagggtttcagcttgtggactctttcatattgcttactcaagtgccccagagatgttgaaggcagaacttcggtcgatttacagtcaattgtgtcaagacgacatgcctatggtgcgaaggtcggctgcgacaaacttggggaagtttgctgctaccgttgaatctgcttacctcaagagtgatatcatgtcaatatttgatgatcttacacaggatgatcacgattctgtacgcttattagctgttgagggctgtgctgcacttggcaagctgctggaaccacaggactgtgtggcacatatcctgcctgtcattgtcaacttctctcaggacaagtcttggcgcgtgcgatacatggttgctaaccagttgtatgaactatgtgaagctgtagggcctgagcccactaggacggatttggtgcctgcctatgtccgtttgcttcgagataatgaagctgaagttcgcatagctgctgcaggaaaagtcaccaaattctgtcggattcttagtcccgagctagctattcagcatattcttccctgtgtgaaggaattatcatcagactcttcacagcatgtcagatctgctttggcttctgttataatggggatggctcctgttttgggaaaggatgcaaccattgaacatcttcttccaatatttctttcccttctgaaggacgagtttcctgatgtgcgcttgaacatcattagcaagcttgatcaagtcaatcaggtgattgggattgatttattatcccaatctctattaccagctattgttgagctggcagaggacaggcattggcgagtccgtcttgcaataatagaatacatacccctgttggcaagtcaattgggcataggattttttgatgataagcttggtgctctttgtatgcaatggttacaggacaaggtttattcaatcagagatgctgctgctaataacttaaagcgtcttgcagaggaatttggtccagagtgggcaatgcagcatataattcctcaggtcttagatatgactaccagtcctcattatttatatcgaatgactattcttagagcaatttcattgcttgcacctgtgatgggctctgagataacttgttccaagttgctgcctgtggttattcatgctacaaaggatagagtgcccaacattaaatttaatgtggcaaaggtgttgcaatcccttatacctattgttgaccactcggtggtggagaaaaccattcgccctagtttagtagagctagctgaagaccctgatgttgatgttcgcttttatgccaatcaagcacttcagtcaattgataacgtcatgatgtcaggctagagaatataactttggtgagagtactagaaatctctcctcaaatcctctttgatagtcttgggattttgctctcacacgaagacacaagggaaaatgtgcaagcaaaatgcattctgttgagcttggagtcgtatattgttactaattcttttgtaggatttgacattcaagatgctgtgacactaatgaagaccgagtgtttttaaatgtaaagttgcttctgcactatttagatctgctaagctcatgtatttgtttttgttagtgtacttttttggtgtttgaacttcccacgttttctgcg

SEQ ID NO: 34 - DNA, 1061 bp, Unknown Organism
  polynucleotide sequence that is cell cycle modulated or involved in the cell cycle process
tttgtacaaaaaagcaggctggtaccggtccggaattcccgggatatcgtcgacccacgcgtccgagaaattagcagttagagacactgagaagcagcagctctcttcctcagctgctgtgtgcttaggcaaagaataaaatgggggcagacaaagggaagaagcagaaagtggatgaggaaaacaacaatgttattgatgaaaagctcattttttccattgaaaaattgcaagagatacaagacgagctcgagaagatcaatgaaaaagcaagcgacgaagtgttggaagtagaacagaagtacaacgagatccgcaagcctgtctacgataagcgaaatgatgtcattagctctatttctgacttctggttgactgcttttttgagtcatcctgttcttggtaaccttctcactgaagaggaccaaaagattttcaaatttgtaagttctattgaagtggaagactcaaaggatgtgaaatcgggtcattcaatcacgtttaactttaagcccaatccttattttgaaaattcaaagctctcaaagacgtataccttccttgaagatggacctacaaaaattacagctacaacaataaaatggaaagaaggcatgggcattcctaatggagttgctgacaagaagaaaggaaacaagcggtcccacgctgaagaaagtttctttacatggttcagtgaagtcaatcaaaaaggtgatgtggatgatgacgaaaatgagattctggacattcaggatgatgaggttgctgaaataatcaaggatgacttgtggcctaaccctctcaattattttgaccatgagcctgatgaagaagatattgagggcgatgagggaaaggacagcggaggctctgaagaggaagaagaagaggaagatgatgaagatgaagaagacgaatgaactgttggtagaccttgtgtttgatttgagttctcatcagtgtttcaatcatcagagttggtctctgtaaagaggtttcggatattgcagaaaaattgaatgacatatagtggtgactctaatttttagtttcagtga

SEQ ID NO: 35 - DNA, 2876 bp, Unknown Organism
  polynucleotide sequence that is cell cycle modulated or involved in the cell cycle process
ccacgcgtccgatcttgaaaaagttccattcttttttctccttctgcttcttcttctgattgaagattctgaacctgttctaagtttatggataggtggaatacttcactgagtggatattacaactacccttttcgattcttgcatttttattccatttttgttgtgattgtgttttcttccattttccctattatatcagctgggaggaggtcagatggggttattgtaactcaagctgattttcaagcacttaaggccattaaacatgaactgattgattttagaggaatcttgacaagttggaatgatagtggtttaggagcttgtgctggtggatggataggtataaagtgtgttaatggggaagttatagctatacagttgccttggaagggattaggtggcacaatctctgaaaaaattggtcaattacaagctcttagaaagcttagtattcatgacaatgttattgctggtcttgttccaacttcgttgagtttccttccaaatcttagaggtgtttatcttttcaataaccggctttcgggttcaatcccaccaaccattggcagatctccacttcttcagactcttgatcttagcaacaatcagctcactggtactatccctcctagtcttgcaaattccacaaggttatacagactcaacttgagctacaatgcactttcaggttcaatcccagtaagttttactcaatccccttctcttacttttcttgcacttgaacataacaatctttctggctctattcctgatacttggggtaatgttgttgtgaacgataagtcttatcaacttcagtatcttacccttgatcacaatcttttatatgggaaaattccagcttcaattagcaagttaagtatgcttgaggagattaatcttagtcataaccaaattaatgggactattcctgatgaattaagtgcacttacaaggcttgctcttcttgatttatctaataattccataaatggaactattcctgttagtttctccaatctttcagctcttgttactttgaatttaaagagcaatcttttggataaccaaatcccagatgtcatatatagattgcaaaatctttcagtgttggatttgagtaagaataagctcactggccatattcctgccaccattgggaatatttctaggctcaactcacttgatttatctgaaaacaatttcactggtgaaatcccaaactctcttgtttctttggcaaatttgacttctttggatgtctcttataacaatctttctggggttgtcccatctcttctttctaagaagttcaattcaagtgcttttgttggaaatctagagctatgtggatatagtccctcaactctatgtgcttcaccacctcctcaaactcttcctccttctcctattggtggggttgccaagcctcgccatcgcaaacttagtactaaggatatcattctcatagcatctggagcacttctagttgttctacttcttttgtgttgcatgctactttgctgcttgattaggaaaaaggcaaattcgaaagcaaaaaatggtagtaaagccagtggcttagctaccacagggagaggtgcaaagccggttccagcagcagcagcaggtgctgaagttgaatcaacaggtggaaagctagtccatttcgatggaccattcgtgttcacagcggacgacttgttatgtgccactgcagagataatgggaaagaacacttatggaacagcatataaggctacattagaggatggtaatcaagttgctgtgaagaggctgcgcgagaagatcacaaaagggcaaaaagagtttgaagctgaagttgctgaattaggcaagattcgacacccaaatattttggctcttagagcctattacttgggacctaaaggagagaagcttcttgtctatgactacatgcctaatggaagtctctcatccttcctccatgctcgaggtcctgagacaacaatagactggcctacaaggatgaggattgctattggcataacaaaaggcatctgctttttgcataccaaagaaaacataatacatgggaatcttacatcaagcaacatactacttgatgagctaaacaacccaaagattgcagatgtaggcctttctaggcttatgacaagtgctggaaacaccaatgtgattgccactgcaggcacactaggttatcgtgcaccagagctttcaaagatcaagaatgcaagtactaagaccgatgtctatagtgttggagttatcattttggagctcttaactggaaagtcacctagcgaggcaacagatggactcgatttgccacagtgggttgcttccattgtaaaagaggagtggactaatgaagtgtttgatgtggaacttatgagggatgcccctaatattggtgatgaattgcttaatactttgaaactagctttgcattgtgttgatccaacaccaactgctcggcctgaagctgagcaagtacttcagaaattggaggagattaaaccagagctgatgttagcaccccccagttctggaaatgatggcgctgcagttcaagaaaaaaatgaataaactcagtaaggtttgattgctaaaagtgtattgaaaaaggtttaggagttccagcttttttacttgattgacacccacctatttattctttcatttttttttttgatccagtggagtgagttgttgtctcctattagttctattagtaaactgtatatccgagcttctgattgctgcatagatgcaaaacgcattttgttcaattccctctattctttgcaatgtaatgcaataatagtatctatctttttgatgacatcaacacacgccacgtg

SEQ ID NO: 36 - DNA, 2018 bp, Unknown Organism
  polynucleotide sequence that is cell cycle modulated or involved in the cell cycle process
ccacgcgtccgccgtgatgtaatcttggtgatgctacttattcccttttcccttcttgagcccaaactcaagaaggtcaaaaacaaaaaaattacaaaaagctggaatcttgcagtttttttatttaatttatttatcctatgttgaattaatttttggggtcaatatttcccaatttgtagtctccaatggagcctcgtgttggtaataagttccggcttggccggaaaatcggtagcggttcttttggagagatctatctcggcgctaatgttcaaactaacgaagaggttgcaattaagctggaaaatgtgaaaacaaagcatcctcaactattatacgaagcaaagttgtataaaatactacaaggaggaactggaatccccaatttaaaatggtttggagttgaaggagattataatgcccttgtgatggatttgctggggcctagtcttgaagatctcttcaacttctgcagtaggaagctgtctttaaagaccgttctcatgctcgcagatcagatgattaatcgggttgaatttgttcatgccaaatcttttcttcatcgagatataaaacctgacaactttcttatgggattaggaagacgtgcaaatcaggtctatatgattgattttgggctggccaagaagtatagagactcatcaactcatcagcatattccgtatagagaaaacaaaaatttgacaggaactgctagatacgcaagcatgaatactcatcttggcattgaacaaagtcgaagggatgatttggaatcgctgggttatgttttaatgtacttcttaagaggaagtctcccttggcaggggctgaaagcaggcactaagaaacagaagtatgagaagatcagtgagaagaaagtatcaacatcaatagagaccttgtgtaggggatatcctgcagagtttgcatcatattttcattactgtcgatcactaagatttgatgataaaccagattatgcttatctgaagagaattttccgtgatcttttcattcgtgaagggtttcaatttgattatatatttgactggaccattttgaaatatcagcaatcacagcttgccaatcctccatctcgtgctcttggtggtactgctgggccaagctcagggatgcctcatgctcttgttaatgttgagaggcaatcaggtggagatgaaggtcgaccaactggttggtcttcatcaaatcttacacgtaataagagcacggggctgcatttcaattctggaagcttattgaagcaaaaaggcacagttgctaatgatttatccatgggtaaagagttatccagttctaattttttccggtcaagtggaccattgaggcgtccagttgtctctagcatccgagacccagtgattgcagggggtgaacctgacccctccggcactctgacaaaagatgcaagcccgggaccattgcgtaaagtatccagtgctgcacggaggagttcaccagttgtgtcctcagatcacaagcgcagctcctctatcaaaaatgccaacataaagaatttagagtccaccgtcaagggaatagagggtttaagttttcgatgatgagggactgcattagtagctgtgctttgtctcagttctccgttcactgtaaattttggcacaccaacttggggagtaagagttctgatattagttgctgtcaggaagtaccataaagctgaattatacaattaaaatttgggatccaatcgcaaaagcacattaaggatatgatggggttgcagatccaaactcacagattccagtttatgctcgtccatacagttataggcactttccatattcttttctttaatctctgtctcttgcttgttattgttatgtcgtggtattcttgttgaggtcatgtttgtgaattgcgaagatggtcatgtataattgccgagaaatcatgtactagtttgttttaaacatgagcaaactgttattttgttcaagctactttaatatcaaaaaaaaaaaaaaaag

SEQ ID NO: 37 - DNA, 670 bp, Unknown Organism
  polynucleotide sequence that is cell cycle modulated or involved in the cell cycle process
ccacgcgtccgcccacgcgtccggaagaagaagcctgctgccatggcttccgagaaagaagctgctcttctcaccgttccttcagattctcctaccttatttgacaagatcattaacaaggaaatcccagcaaacattgtctacgaggatgacaaggttttagctttcagagacataaatccccaagctccggtgcacattctgcttattcccaaggtcagggatggcttgactggactgtccaaggctgaagaaaagcattgtgaaattcttggtcaacttctttacaccgcaaagcttgttgctaaacaagaaggtctgctcgagaatgggttcagacttgtgatcaatgatgggcctagtggatgccaatctgtttatcatcttcaccttcaccttctcgggggacgacagatgaactggccacccggctaaaggaagccgagatgaattccagatctcatggagtatccagacttcatccgatcatctatgtgtagcacttactgaaaacactatcgtctatgtgtagcgtttgaagaatcaagctctaagctcgtcctatgctcctatggagtgacaaataggactcattccgactattatattgatcatcaataagagggatttctctgaaaaaaaaaaaaaaaaaaaaaaaaaaaaaaaaaaa

SEQ ID NO: 38 - DNA, 886 bp, Unknown Organism
  polynucleotide sequence that is cell cycle modulated or involved in the cell cycle process
ccacgcgtccgcaatattttgactaatacactgttctgttcttcacctaattcttttcttcttctaataataacgtgctgctaagtcctaaagctcctctttggagctccaattaactccaaactaccaaaatccagagcaggtttaacaaagaatgggggttggaggacgtgaagtggcgatttcattggatggagtgagggacaagaatatgatgcaattgaagaaaatcaatactgcaattttcccagttcgctacaacgataagtattacactgatgccattgcctctggtgatttcaccaagctagcatattacagtgatatttgtgtaggttcaattgcatgtcgccttgagaagaaggaagctggggctgttcgtgtttacataatgactctgggtgttttggctccatatcgtgggctaggtattggcaaaatgttgttgaaccatatcctcaatctttctgccaagcagaacgttagcgagatttatttgcatgtgcacacaattaacgaagatgccctcaatttctataagaaatttggatttgaggttactgataaaatccaaaattattatacaaacataaccccaccagactgttttgtcctgaccaagttcatcactcaaacgaagaaatagatagtctcagctactttgattgagccttggtcaaaccttcacattatctttgaggttctgagctttctggttctagtttttgctacttatgagtaatgtgccacccattggattgttagtgtaagcccttttctgttctatcttatcctatctgcaacaacatcaaagttgaatgatttccctgtaatagaaatagtgcagttcaatgcaaacattcgagtttggttatgttagatcacg

SEQ ID NO: 39 - DNA, 1265 bp, Unknown Organism
  polynucleotide sequence that is cell cycle modulated or involved in the cell cycle process
gatatcgtcgacccacgcgtccgaaagagaagaaatattaaatagcacaagaaaaatggagagtgctaatgcatattctacattgccaatggaaaatgttaacgatgttgggcttattaatttcatggacgaggctaactttgaacaatttattgagctcattaagggtgaaactgctgaccctatcgtgaagttttgccccaactatgactgtgaacacattacaggttgttttccttcgactgatgtccaatttgagccaacaccaatggatatctttgattggaatgctacaaacatatctaatcctatttcacttttttcttccctccccggagaaatgaagctccgggaagaagaagaggaggaggaagacgacaatgattacgaggaatcttctgggacaacaactaccaccaccatgactatgttgccggcaacgccaacaaagaagagcacgaggactgaccgatcaagaactttaatttccgagcgaaaaagaagaggaagaatgaaagagaagctttatgccttgcgttccttagttcctaatataacaaagatggataaagcctccattataggagatgcaatactatatgtacaaggactgcaaacgcaagcaaagttactaaaggcagaaatagcaggtcttgagtcttcctcaaatgaaatgaacaataatccatttcagaataccaagcaaatgaaattgatgactcattatcctgcaatcaagaggatatcgaagatggacatttttcaagtaggagaaagaagcttttacgtgagattagtatgcaacaaagggcgacaagttgctggttctcttttcaaagctcttgagtctctttctggattcaatgttcaaagctccaacttggctacttctgccgatgattatattttgacgttcactcttaatgtgagcgaatgtgaggtagacatgaacttggccaatttgaagctatggatagctagtgcttttcttaatcaagggtttgacttcgagacattaccattggcctaacgtttcattattgtaattgtgcagagttttaaccggtcaaagaatgagaaatgtcattatttatcggtcgtcatttgtaacttttgattatttagagtcacgtattctaaaagagtaaagtttgtcaaattgcaatggcgcgcatcgcactgtgtacatgtgaccgacctaattgtttattacggttgactttgttactactacttttggaatcaaaacagtcatggcgggcgcg

SEQ ID NO: 40 - DNA, 1068 bp, Unknown Organism
  polynucleotide sequence that is cell cycle modulated or involved in the cell cycle process
ccacgcgtccgctttccacattctctcaactttctctttctaaaactcttcctctttttctagcacacagaccttcaatggcatcgccgcgcgaggagaacgtgtacctggcgaagcttgctgagcaagccgaacgctacgaggagatggtagagttcatggagaaagtcgtcggcgccggcgacgacgaactcaccgtcgaggaacgcaacctcctctccgtcgcgtacaaaaatgtgatcggagcgaggcgagcgtcgtggcgcataatctcatcgatcgagcagaaagaagagagtcgcggtaacgaagatcacgtggcctccattaaaacctacagatctaagatcgaatctgaattgacttcgatctgcaatggtatccttaagttgctcgattcaaaactcattggcaccgctgctaccggtgactctaaggttttctatttgaaaatgaagggagattattacaggtacttggctgagttcaaaaccggagctgagagaaaagaagccgccgagaatactctttcggcttacaagtcggctcaggatattgctaatgttgaattagcccctacacatccaatccgattggggctagctctcaatttctcagtgttttactatgagatattgaactctcctgaccgtgcttgtaatctcgccaaacaggcatttgatgaggctattgcggagcttgacaccctgggagaggagtcctacaaggatagcactttgattatgcaacttcttcgtgataacctcactttgtggacctcggatatgcaggatgatggaactgatgagatcaaagaaccatcaaaagcggaggagcagcagtaatgtgagtgaagcctctttgcttaggattgaatcctatggcataactttgctcattgatcgaaatttgctgtttgtgtagttctgaattccctgaattgtaatacctaaaagcactgtttcttgccatttgttgttttcagcaaagattactttttctctcggtatttcccttgtatttggatgctccagtgaaactctcttatttcgtggaaatgaatgcttg

SEQ ID NO: 41 - DNA, 1239 bp, Unknown Organism
  polynucleotide sequence that is cell cycle modulated or involved in the cell cycle process
ccacgcgtccgcccacgcgtccgctccatgtttcatttactttggagttggttgctaaaacagattaaagctagctgctaagctagtactgttagagttttgttaattagaagaaactaaagagtcaaaaacagtggatccaaggcatggaaagaggggacttttcatccaatgaaatggaaatggaagagaaagagaataacgataatattgatgatcctcaacttcaagaggagctctataatatatactcagctcgatctcagcatgacatgtctgctatggtttctgtcctttctcaagttattggaaacagtaccacccattcttcttctgctaatgctactccattaaccctacctcaatctgctgtagctctccaaaaccaatctcaatctattgaggatcaagggaattcgagaagaaaaaggtatagaggagtgaggcaaagaccatggggaaagtgggcagccgaaatccgagacccaaagaaagcagctagagtatggcttggcacttttgaaactgctgaggctgcagcaattgcctacgatgaagcagctctcagattcaaaggcaacaaagccaaactcaacttccctgaaagagttcaaggcaaattccaataccttactactactactagtcaaaatcatcacttgcctgataatattgttcaacaacaatatattccaactagctccaataataatcatcctctcccttgtcaagaacattatcctagtttacatcactatgctcagctacttcagagtgacagcaatattactgatttaaacttcggtatctcgccaagttataatcagcagttatctgcttcttttgattttgcgcaatcatcatctaacagtacattatcggaattgccagcttcttatgagcagaggcaattacaatcaagttacaagcaagaagaagaagttttaatgagattttcatcgcattttggtactacttcaagctcatctggacctcatgaaagtaactgggaagagtttgaagatagaaagtcataagttcattccctagtattaagagatacgaagactgaaagaagttttatgagatttccgtcgcattttatttcgtagtttatggttttactggggttttctgtcctctgatcttgtatttcagttaagtgtaatagtagaactatatatattcatgaattaatggaaaaatattggtgtggttttatgtgtttaaaaaaaaaaa

SEQ ID NO: 42 - DNA, 1893 bp, Unknown Organism
  polynucleotide sequence that is cell cycle modulated or involved in the cell cycle process
ccacgcgtccgcccacgcgtccgcccacgcgtccgatttgcttttccctcctcttctcctccattttcctttaatgtcactaaaacagaagaaggggggaacagaaaagagttagaaaatgataggagggaataatagttttgggaagacaatttgctcaatctgttatgaagatctaaatcctattattgaagacctccaatccatttctatttgcggtcacgtttttcacgagatttgtcttcagcaatggtttgaatactgtacaaatggaaaaaagaagaattgtccagtttgcaaacaggcttgttcagaacaaaatgcaaataggctttatttccaatcagttggtgatccaaatgatacaagtctgaccaagaaaccccgtgatcatgaagaggatccacgtgaactgagaaatgaggtcaaaagattggaggggaaagttttacagttgacttctactttggagaaacagctgaaagatctcaaagaagtcaatgcagagcttttcacatgcaaggaagagttgaaaatagaagcgactctaaagaatgaagctgtgaaacaggaggcagccattcagcagttgttacatcttaaatccaaggagctagatcgatcaactttggagtgcataaggctaaaagatggaaatatggctctagatagggagcttgcagcactcaagttgagttacaaagaactagtgaccaagtgcgatactcatggaaggcgagaggctcgttctcttaggaaacttgagaagtcaaaagaaaagataaataagttgaagaccagggtccaagaacttgagacggcacttgaaagaaaagaaaaagataatgaaaatttgagaactttgagagctgccaagaaaaactttgagttgtatcaaggaagcaaagaacccaaagttgaccgacgttcatatgagaatcagaataaggcacctgctgcgacagaagtagatttatgcatagtcactggctcatgcaatgatttatctagaccaaggagaaaaagaaagtctaagtctaaggaaaagagtatacaaaacacggcagaagatattataactggtggaagtcaagtgcagggatcagaaaataaggatggaatctcaggttcaaggaattcccctgttattattcttgacgatgatactgatcttccgcttctagatgatgttacacagcatcagccctcgtttcgcatcaggaaagagacttctgcaccagttatacttgcccatccaggagatacctgtttttctggtggattattaggtcctgatggtacttactggcacttgggaaaatggtgcaagaaggttaaggacaagggatctggatcactgtcttgaggactgcaaggatcaggtgtgactgctgttgatttgattgctgtaggagctgacggtagaggcggttggatcaaagttctgcgatcaatgaatccgggatcattgcaggacaaaaataagagtgtcatcagtcaagagatacaagtatgacatgaaatcaagtagttcccagtctcaaggatgcttgcatacagatagcttcttcagaagaaccagtggataaccttattaacagtgctgcttctacattaccaactgtagataatagagattaaattccttatacattgtttaggggtttaatttttagcaatctagttatactaccatttgattgaatggtccgaaaagaagaaacttaatgtcttcttttgagcatgtaaagtagggattcaaaggggaaaggtagcatacaggggagagaaaagcaagaaagcaacttcagcaattgtttcttagcggttttcagttatgttgcttgctcaatccatattgaaagtatactcttggtaaaaaaaaaaaaaaag

SEQ ID NO: 43 - DNA, 1240 bp, Unknown Organism
  polynucleotide sequence that is cell cycle modulated or involved in the cell cycle process
ccacgcgtccgatcaaatcttggcaactatggcttccttattatcggtgccattgtctctatcatcctcatcaatgcaattaagactatcatcaaggatagactccattacttcaacaaccaagctagtgaaggaggagagccaagtagagctcctcagaaagttttaccaattgagatgtccttggatgagctaaatatactaactgataactttgatgagaaagctctgattggaaagggatcttatggctgcgtttttggtgctaaattaagcaatgaccaacaagtagcaataaagaaattggatactagttcttcaccagaaccagattccgactttgcagatcagttagcaatggtttcaagacttaagcatgagcattttgtgactctaatgggttattgcgtggaagcaaacaatcgaatcttggtttatgagtttgcaaccatgggcacgttgcatgatgtattacatggtagaaagggagtacaaggtgctaagcctggtctacttcttacctggaatcagagagttaaaattgcttgtggtgtagctagtggcctcgaatatctacatgaaaaagttgaacctccaattattcatcacgatgttagatctagcaatgtactactctttgatgatttcacagcaaagattgctgatttcaacttgacaacctctgaatcttcagaggactttggctaccatggtccagagtatgccatggaagaagagataacaaagaaaagtgatgtttatagttttggagttattctattggagctgttgacaggaaggaagccaatattagattataaagggcaacagagtcttgttgcatgggcaactcccctattaagtgaagataaagtgaaggagtgtgttgatcccaacctaaataatgactaccctccaaaggcaattgccaaggtggctgctcttgtagaactttgtgttcaatatgaggcagatttccggccaaacatgtcaattatggtcagggcactgaagccacttctcaatgcaaattaaactagaacctcaagcatacaacattattcttaattgaaacaagctgcagggacagttttaagtaccaacagggctgtgacccaagtcatggttccgttgccaatccaaggaaaaaggaaatcttgctaaaggactattggaatgttgttttcttaactgatttgtttaagattaaatatattatgttctcattttaaaaaaaaaa

SEQ ID NO: 44 - DNA, 706 bp, Unknown Organism
  polynucleotide sequence that is cell cycle modulated or involved in the cell cycle process
ccacgcgtccggaatcgacaatgaaattcagccgcgcattcaatgccgcttcagttctcttagttcttcttcttattaccatagttacggctaagaagtccggtgatgttacggaattgcagatcggtgtgaagtttaagccaaaatcttgcgaacttaaggctcacaagggtgatagagtctcagtacactacagtggaaaacttacagatggaactgtatttgactccagctatgagaggaatgaccccattgagtttgagcttggaagtggtcaagtgattaaaggttgggatcaaggacttcttggaatgtgcgtgggagagaagcgaaagttgaagatccctgctaaacttggttatggcgagagtggatctccaccaaagattccaggtggtgctacacttgtcttcgacactgagctggttgctgtgaatggaaagagatcagcagctgatagtgaactgtgatttaacgatgtctctacactcttcattagcgacttctaaatctatttttaggttatcttatagttatatttgcttctttttgataatttagatactaaagtattggctgctggcaaaatgacacctcaagtgtgtttccttttgtcactagttttttcctctgctaaagttaagtggatggacgatgaactcccaagatggttttgccatcattacttttaaaaaaaaaaaaaaag

SEQ ID NO: 45 - DNA, 1960 bp, Unknown Organism
  polynucleotide sequence that is cell cycle modulated or involved in the cell cycle process
ccacgcgtccgcgaaccaaaacttccagaacccaatatttacaacctgtcttccgccaccattgacaagaaccttaaaaagcttgcttccaagtaacaataagagaaggttgattggaaaatacatttgattatttttattagagaatggcggggactaaggaacagataatggatgttcggtctgtggtggaagcagtaacagccgccggagatgatgttgagattgatactcctctttatgttgttgaaagcctctgtatgcgctgtggtgaaaatggtacaacaaggtttctcttaacactgattccacattttagaaagatattattgtcagcatttgactgcccacattgtagtgaaagaaataatgaagtggagttcgctggtgaaattcagcctcgaggatgttgctatggcttgcatattccatcaggtgatcaaaagatgctcgaccgaacggttgtcaaatctgaaagtgctaccatcaagatccctgaactggattttgagatcccccccgaggctcagcgtggatcattgtcaacggtagaaggcatactggttcgagctgctgacggtttgggggcccttcaagatgaacggaagaaagtggatccccagatggctgaagcaatagatcggttcttgataaaactgagagcttgtgcttcaggagattcatcctttactttcattcttgatgatcctgctggtaacagctttattgagaacccgttagctccatctcctgatccctcattgaaaatcacattctatgagcgaactcctgagcaacaggcagctttagggtatcttgccgacccatcacagcttggaggacaaagtgatgaggtatcaagtgagggtataaataatgttcctcatcacctgctaaaggaaccacatggatcagttggagcaagagcaggacgtcaggctattgctcagggtaacagtgcagaaatagctgaagctctatttcgatattcagctcctgaagaggtgatgatgtttccatcaacttgtggagcatgcgctgcgaggtgtgactgtagaatgtttgttaccaatattccatactttcaagaagtaatagttatggcatcctcttgtgatgcttgtggttatcgcaactctgagctgaaacctggtggtcctatatctgataagggaaagaaaattacccttcatgtggaaaacattgaagacttaagccgtgatgtgattaagtctgatagtgctggagtggaaattcctgagcttgagttagagcttgctagtggcactttgggtggaatggtgacgacagttgagggtttaatcacaaaaattaacgaaagtcttgagagagtacatggattcacatttggagacagtcttgatgaagacaggaagagcaagtggttggacttccgagcaagactagacaagcttttgagcttgggacaaccgtggacattgatcatcgacgatgcactttcaaattcttttgttgcacctgcaaccgatgatatcaaggatgacaaacagttaacatttgaagattacgtaagatcgtgggagcaaaatgaggagctgggtcttaatgacatggacaccacctcagctgatgctgcttacagttcagcagatgctgcacccagtgagaaagctgacgattgatgaatttatgcttagtgattttctttcatactgctttggccttaaaatctaaggtaagcgttgattgttctttcatatgactgtagaagagatctagaaccataaaagattgccaacgcctgcagccatgtctacatagtggccttgtgactagaactcctttaaatagagagacaaacattttaattagctatacgggttcctttaatcaaacacttcagagttattaacaatgcaatttgttttagaagatagtttgcaatgcaatgatttttgacttgtaaaaaatatcaatc

SEQ ID NO: 46 - DNA, 962 bp, Unknown Organism
  polynucleotide sequence that is cell cycle modulated or involved in the cell cycle process
ccacgcgtccggtggatttgtgtgcagcaccaggcagctggagtcaggttttaagccggaagttatatctcccagcaaagttgtcatctgataccaaggacggcgatctaccacttattgtggctattgacttacagcctatggctcccattgaaggtgttattcaagtacagggtgatataacaaatgctaaaacagctgaagtggttattagacattttgacggatgcaaggctgacattgttgtctgtgatggtgcacctgatgtaacgggacttcatgacatggatgaatttgttcagtcccagctgatattggcgggcctaaccattgtcactcacatactaaaaggaggcggaaagttcatagcaaaaatttttcgaggaaaagacacaagccttctttactgtcagctaaaactatttttcacagaagtgacttttgctaagccaaaaagcagtcggaattctagcatagaggcatttgcagtttgcgagaattactctccacctgaaggatttaatgagaaagatcttcatcgccttcttgaaaagattggaagtccatctggcacagaggacctagattgcagtagtgcatggctggaaggtcctaataaggtgtatattccatttctggcttgtggagaccttagcgggtacgattcagaccgttcatatccacttcctaaagctgcagatggaacctatcagtgtttagatcctgtacaacctccaattgcaccgccatataaacgagctcttgaaatgaagaaagcgtcgaatcaaggaatccaaaacctagacaagctttctcttagctcctaatcttaccatccagaattattccattctgtgacattggaaagtcgcttatacgtcaccaaatgtaaggactttttattgttaactgcacttgcaattaatgaatttaatgtgttttgttaaaaaaaaaaaaaaagg

SEQ ID NO: 47 - DNA, 1466 bp, Unknown Organism
  polynucleotide sequence that is cell cycle modulated or involved in the cell cycle process
ccacgcgtccgtgcagaaatggcgactcgttatctgactcgttccttattcactgctctctctcgctcatacacttctctttctctctctacacctcctccctctctctcttctttttctctcctccgtcttcgaccgcttattgccgtcacagctgtcaacctccgcagcgtctctccggcggtagcaacctcctttcgagggtttgcgactcggcaaacgtcgtcgtctttaaatgacccgaacccgaactggtccaaccgtcccccgaaggagacgatcctacttgatggatgtgattttgagcactggcttgttgtgatggagaaacctgagggtgatcctaccagagatgaaatcatcgatagctacatcaaaactctggctaaagttgttggaagcgaggaagaagcaagaatgaagatatactctgtctcgacaagacattactatgcatttggagctcttgtatccgaagaacttcattacaagctaaaagaactgcccagggttagctgggtgcttcctgattccttcctggatgttaagaataaagattacggaggggaaccttttatcaatgggcaggctgtaccatacgacccaaagtaccacgaggagtgggtaagaaacaatgcccgagctaatgagaggaacaggcgcaatgaccgacctcgtaactttgataggtccagaaattttgagagaagaagagagatgcagaacactggatccaacatgggtggtggacctcccaatatgacgaatgcgccaaccccaaacatgggtgggatgcagcagcctaacatgggtgggaggcatcagcctagcatgggaggaccacagcagcccaatatgggaggtgcacctcataactacggtggagcgcctcccaataactatggtggagcgccaaacaatccaaataattttcaatacaatagtggacaaagcaacggaggcatgccttaccaaacaggtccaggaccaaaccagaattatgcttcaaatacatctggtggaaacccttatcagaatccaaacatgcctggaagagatatgccccctccaaatcagaactatgctccgaatacggctggtggaaacccttatcagaatcaaaacatgcctggaagagatatgccccctcgaaattatcaataggctgatatagataagtatgaactttgtatttccagagttctgtttcacgaaatgagaacatagctatggtgtgcttgataggatgttgctgcgtgtaatagttgaatgtgcaaaacttatatgctttgtgagtatgcaatgtcaaggtgttctcatcctattgcatcctctatgttgacatgctctctgtcaattctcctgatgagtttactagcctgaccaagaatatgttatgctttaccatgttgaatgcttgaaatttcagggcctcattgcaggtactgttcaaaaaaaaaaaaagg

SEQ ID NO: 48 - DNA, 1281 bp, Unknown Organism
  polynucleotide sequence that is cell cycle modulated or involved in the cell cycle process
ccacgcgtccggaaatggcgactcggtatctgactcgttccttattcactgctctctctcgcccatacacttgtctttctctctctacacctcctccggtctatcttttctttctctctcctccgtcttcgaccacttatcgccggcgccgctgtcaacctccgcagcgtctctccggcgggagcaacctcctttcgagggtttgcgactcggcaaacgtcggcgtcgttaaatgacccgaacccgaactggtccaatcggcccccgaaggagacgaccctacttgatggatgtgattttgagcactggcttgttgtgatggagaaacctgagggcgatcctaccagagatgaaatcatcgatagctacatcaaaactctggctaaagttgttggaagcgaggaagaagcaagaatgaagatatactctgtctcgacaaggcattactatgcatttggagctcttgtatccgaagaactttcttacaagctaaaagaagtgccgaaggttagctgggtgcttcctgattcctacctggatgttaagaataaagattatggaggggagccttttatcaatgggcaggctgtaccatacgacccaaagtaccatgaggagtgggtaagaaacaatgcccgagctaatgagaagaacaggcgcaatgaccgacctcgtaactttgataggtccagaaattttgagagaagaagagagatgcagaacactggacccaacatgggtggtggacctcccaacatgacgaatgcgccacccccaaacatgggtgggatgcagcagcctaacatgggcgggaggcatcagcctagcatgggaggaccacagcagcccaacatgggaggtgcacctcataactatggtggagcgcctcccaataactatggtgggtcgcctcccaataactacggtggagcacctcccaattactatggtggagcgccaaacaatccaaccaattttcaatacaatggtggaccaaccaacggaggcatgccttaccaaacaagtccagggccaaatcagaattatgcttcaaatacatctggtggaaacccttatcagaatcaaagcatgcctggaagagatgtgccccctccaaatcagaactatgctccgaatacggctgacagaaccccttatcagaaccaaaacatgcctggaagagatatgccccctcaaaattatcaataggccattgtatatgagtatgaactttgtatttccagaattctatttcacgaaatagtaacagttgtagccgtc

SEQ ID NO: 49 - DNA, 1298 bp, Unknown Organism
  polynucleotide sequence that is cell cycle modulated or involved in the cell cycle process
ccacgcgtccgcaaaaccctaaactcttcaccttcaaacatcaaaatcctctcgcattctctctagtaatggctaccgctaactcctcttctttctcacctgtatcttccccttcaaaccatgttcccctaaagcgagtaggtactcacaatggtagcttccattgagatgaagctcttggttgcttcatgattcgtcttacaaacaagttttacaatgctcagattgtccgtactcgcgatacccaggtgttggaaacgcttgatgcgggtgcttgatgttggtggggtttatgatcctagtcgagaccgttatgatcatcaccaaaagggatttcaagaggtttttggacatggtttcactactaagcttagcagtgctggtcttgtttacaagcattttggaaaggagataattgcaaaggagctccaagttgatgaagaacatccggatgttcataggttgttccttgccatttacaagagcttcatggaggcaattgatgcagtcgacaatggaatcaatcagtacgatacagaccagtcacccagatatgtaaataatactcatttgtcctcacgagttggaagactaaacttggactggattgaacctgatcagtcttctgaaaaggagaatgaagctttcgaacgtgcaatggatttagctggcagtgagttcttggatcgcgtccgctttcatgtaagatcttggttaccagcacgctcaatcatcatggagtgccttgctgcaagacacaagattgatcctagtggagagattgtagtttttactacattttgcccgtggaagcttcatttgtttgagctggaagaggagatgaagattgatcctcccatcaaatatgctttatatcaggatgataggagcaaaagttggcgagtgcaagctgtgggtgtagctcctgacagatttgagagcaggaaagcccttccagctcagtggcgaggtttaagagatgatgaactctccaaggaaacaggaattcctggctgtgtttttatccacatgagtgggtttattggaggaaatcaaagttatgaaggagcactcgcaatggcaaaagctgctttgaagctctaggcacaggaacagttttataaatggatttcagaaactgagtgatctctttatgatttaacattatagctgatcatgacatcaggttgccatttaaatagcgcattggagttgaatttattcaaggttattaaggaaactatacacaaccaggcagacagttttttacatattcagatgctatcttttacttttac

SEQ ID NO: 50 - DNA, 1121 bp, Unknown Organism
  polynucleotide sequence that is cell cycle modulated or involved in the cell cycle process
agcggctggtaccggtccggaattcccgggatatcgtcgacccacgcgtccgtcttcttcttcttcttcttcttcttcttcttcttcttcttcttcttcttcttcttcaatttttctctctctctttttctctagggtatacagaaatggggatcgcaacggagaatcaaccacagcaacaacacaaggcgtcaccagaggcatcatcagaggcagataaaaagaggtggatgcttaatgattttgacattgggaagcctcttggaagaggaaagtttggtcatgtatatctagctagggaaaaaaggagcaatcacgttgtcgcattaaaagtgctgttcaagagccagctaaagcagtcccaggtcgaacatcagcttcgtcgtgaagttgagatacaaagccaccttcgtcatccaaatattttgaggctttatggttacttttatgaccagaaacgtgtgtatttgatcctggaatatgctgccaagggtgaactctacaaggagctgcagaaatgcaaatattttagtgaacggcgtgctgcaacttatgttgcatccttagcccgagccctaatatactgtcatgggaagcacgtaatacacagagatatcaagccggagaatcttttggttggtgcacagggtgaactcaaaattgcagactttgggtggtcagtgcatacctttaatcggaggcggactatgtgtggcactctagactatttgccaccagagatggtggaaagtgtggagcatgacgcaagtgtggatatttggagcctgggtatcctctgctttgagtttctgtatgggatgcctccatttgaagcaaaggaacactcagacacatatcgaaggattgtgcaagtggatctcaaatttcctgccaaaccaattgtctcatcagctgccaaggaccttattagtcagatgcttgtaaaggattcttctcagcgtctgcccctaaaaaaggtcctggagcatccttggattgtgcagaatgcagatccttcaggtgtttataagggctgatgaagacatcaccaatgactcacaatctttgtggcggactaaattgtttttgtttttcactgaaaaagcctttgctcagcgtta

SEQ ID NO: 51 - DNA, 1091 bp, Unknown Organism
  polynucleotide sequence that is cell cycle modulated or involved in the cell cycle process
gtttgtacaaaaaagcaggctggtaccggtccggaattcccgggatatcgtcgacccacgcgtccgcgggaagattctcatgcaattaaccgaatcgtcaaattttcctctaaaatataaagtttctccggaaaatgtcattcatcgatgaatttcaagccaatatagaagctcttccgaaccatttacggaggaaatatgccttattgcgtgatttagataaaagtctgcaaggagtccagaggcaaaatgagcaacgttgtgagaaagaaatagaggatatgatacagcgtattaaggctggtaacgtgacaccagactcttcactaatcaaattctctgatgatgcattggatgagcaaaagcatgcaatccgaattgctgatgagaaagttgcattagcttctcaggcatatgatctggtagacgctcacattcagcagctcgatcagtacttgaaaaaatttgatgaagagctccggagagaaagagatgttgctgttgttactggaactcctgctaccactgttgaaaataatggaaagtccggaaggtctggtgaaggtaagggagggcgcaagaaaacacgtcttgctacagcagcggcagctacagccactgcagcagcagcagcaacaccaagtggaatggatttggatctacctgttgatccaaatgaaccaacatattgtttctgcaatcaagttagctatggtgaaatggttgcgtgcgacaatcctaattgcaaaatagagtggttccactacggctgtgttggccttaaagaacagccaaagggaaaatggttttgcgcggattgtgcaggaacacaaaagaagcggaaaggcagatgatagtagtagaagaaaataattcagtatactgatttaagacgttttaccaccggaaaaatttatgtagatactgtacttctgtaattttgttatgtgtagccattattaacaagtcactcttgcattctaattgtaggagggaagtacaataagtcaacaaaaaatttactcttgtttattatgaactataacgaacaaataaactattgtcttttaccaatcaacatatttgtaatc

SEQ ID NO: 52 - DNA, 1057 bp, Unknown Organism
  polynucleotide sequence that is cell cycle modulated or involved in the cell cycle process
ccacgcgtccgcccacgcgtccgtttcatattcttcttcttctgcttcattgttattgtttatagaaaaaaatccaagaatggagcagttgcaagagggttttcgttttcgtcctacagattcagaacgacttatgtttttgttgagattcattgctaaacaagagatgaatgattctggatttatcacaacaaacatcgacgtctatggcagagaagaaccctgggaaatttacaatcacggcgtatcctgtggtaatgaagataatgcggactacagcagtaactatcgctatttcattacaaagctgaagaagaaaaacaaggcgaggcataatctagaggttggaaataaagggagttggaaacaacaagataagggtaaatcagttcactacaaaaatacgggaaattcatcttctgtggttattggatgcaaaaagagcttgtgttacgtgaataaacatcagtgctataatcagagcgatggacattggctaatgaaggagtacgagctttctaatgttattcttcagaaattcgacgaagattgtagagattatgttctttgtgccatcaaaaggaagtcatgttctactgattatattgagcggccattggcaagggtgcagtatcaagtgaatgatttgggggactatatgcagagcaattcagggcattatgtggaatctgaaacggacatgacgacacagaacgaggtgcccgaattagaagttcttgattatcaattagaagttcttgggatgaaaaggacttagctgatttaaattggatgttatatgatatgcctgtggtcgatcagacggtgaatattgtcgagcagcagaggaaccagaggtcagttattaataagagtgatgaattctatcagatgttggcacaaaacgaagcttttgagttctattgattaactgtatagtcatattcttggtagatgatagagatttgattaacaatggcatatgtcccactttgtagaatggaatttaagatagtagtacatctatatatctttgtataacagtatggcgcgcgcc

SEQ ID NO: 53 - DNA, 1806 bp, Unknown Organism
  polynucleotide sequence that is cell cycle modulated or involved in the cell cycle process
ccacgcgtccgtctatctaagcaatttccgtagttccaaacacggtctaaatcagattccttgcttttttcatctcaaattctctactttttgttgcttcgcaacttggcttagatccttcttcatcacgctttgtaactgcttcactcaagctatttcacgatgcgatcaatgcatagatagctgaaaattcgaagtgcccggaagaaatggagaaggagtcacatggattaattataggcatctcaattggagttgtgataggagtgcttttagctatacttgcatttttctgctttaggtaccataggaaacgtcctcagatagggaatagcagttctaggagggctgccactattcctattcgtgcaaatggtgctgatacttgtacagtattatcagactcttccattggtacagagtcaccaaaatcgactatccagaatggcatgtcagtgtggcttggcggccttaggaaggcaaatgttgtttctgcttccggtatactcgagtactcctacaaggatttgcagagagcaacctacaacttcaccacattgattggtcaaggggcctatggtcctgtttataaggctcagatgtctactggtgagacagttgctgtcaaagtgctcgcaactgattctaaacaaggagagaaagaattccaaacagaggtcatgttactgggaaggctacatcatagaaacctggtgaatttggttggatattgtgcagagaagggtcagcatatgcttatctacgtttacatgagcagaggcagtttggcttctcacttgtacgatgaaaagcttgaacccttgcactgggatttgagagttcaaattgctcttgatgtggctaggggcttagagtatcttcatgacggggcagttcctccagttgtacaccgggatattaaatcatccaatattttgttggatcagtcaatgagagctagggttgctgattttgggctttcaagggaagaaatgatcagtaaacatgtatccaacatccgtggaacattcggatatcttgatcctgaatatatatcaactaggtcattcactaagaaaagcgatgtttacagctttggggtcttactgtttgaacttattgctggtagaaatcctcttcaggggctcatcgagtatgttgaactagcagccatgactacagatggaaaaggtggatgggaggaaattgcagattcccgtcttgatgggaagtatgatttgcaagagcttaatgatgtagctgcacttgcatacaaatgtgtgaatcgtgcccccaagaaacggccttccatgagggacattgtgcaggttctgtcaaggatacttaaatctagacccgacagaaagcgtcccaagcgtttttcatctgcaacagcagaggaggttaccatcaatgctgaacaaccagattatcggagtccaaactctggaccccgacgaggggaatctatggacagcccagctgactcatgtgaagtttaacccagttcttccatttgtttatttttttttttttaatttcttcctcttcttttcttcttgtaaaattggtcaggttgttaggttctccattcataacacacttctgtcttggtgcgttcgattggggtacttaggatctgttatagtctgcgtgtaagatagcctttctttctttccaattttgttaaatttttgtaaatttgcgtggaaggtaaccgaatggcagaaggaaagggtgaaaagcccagatcagccttttgtcaattctatgaaagttcatatatctttccacaaaagtgcacgg

SEQ ID NO: 54 - DNA, 1897 bp, Unknown Organism
  polynucleotide sequence that is cell cycle modulated or involved in the cell cycle process
ccacgcgtccgccagcaagcacagtcgtccacaattagatattgatctgaatgtaccagatgaaagaacttttgatgaaataaattctcgagattctgctctagagttgatctctccattggaccatatgactaatcgtgctgcactgaagaatgaagtaattgattctcctgctgttcgctgttctggaggactcgatcttgatttaaatagagttgatgaacctggtgatgtagggcagtgctctgtgagtagcagtagtagattggatggtgtagttttaccttccaaaacatcatcatccattggcttgccaactggggaggtgaggagggactttgatttaaataatgggcctggtgttgatgattccagcgcagaacagtttttattccacgataatcatcagggaagcatgcgttcccaactgcctgcttctagcctcagactgaacaatccagaaatggggaatctttcttcttggtttactcctgggaatacttattcaactgtgacacttccatcaattttgcctgatcgtgtggagcagccgccattcccaatggtcacacctggtgcacaacgaatattgggtcctcctgctgctggttctcctttcaccgcggatgtttaccggagttcagtattgtcatcatcgcctgccgtgccttacccatcctccccttttcagtatcctatatttcctttcggaacgagcttcccacttccttctgcaacattttcagttggatcagcttctttcgtagattcttcctctggtgggcggctttatacgccccctgtaaattcacagttgctgggtcccgttggcgctgtgtcatctcaatatccaaggccttatatggttggacttcctgacagtagcagcaacggtaccatggatcacaatagaaaatggggaaggcagggtctggatcttaatgcaggccctggagtggtggacatggaagggagagaagagtcggtttctttgtcggcaaggcaactctctgttgccggttcacaagcattagcagacgagcatggtagaatgtatgctgtacctgggggtgttctgaagaggaaggagcctgagggtgggtgggacagtgagaacttcagattcaagcagtcatggcactaagatctgcaatctggtgattttataagctactggaggatggacttggctaactcctcaaactctcagcttctggcatgctcctgtgggtgggcggtaagtgagcaaatttgatgtgttcagagtctccgaccaccacctcttcagcttatcagtgtagttgggatttccatggtttgcaagcactgcactttggtcagctatattctctgggtggatgcagatgagttttccctctgtagatatttaactgttggaaagcttgaaatctttgatgcccagggactggggataaatcaatgttatcctgtccaaattattgacaatggaggtccaatttcgagactgaatcaaacggaaagcttttctttgtgctttgctgttaatcatctttcaatgcttcccgtgttcttggcttttctctgtcctcctttgcccattacatatgtatacagggttgacaccaaattttggtactaatgctttcatcaggcatgttttagttgttgtggctgccattgtaccataaattaaatcgttctaacgttagtttgtagtctcattcacagatgatagaactcttgttaatgatattttcaatgatggtggggtgatgtgcttgtttttctttcaagctactaatctgaaccaacagtcttgtgagcaacgaaaagacaacttctgttttctgatttggagaaattaaatgggtggagcttttgcatgggttaaaaaaaaaaaaaaaaaaaaaaaaag

SEQ ID NO: 55 - DNA, 1157 bp, Unknown Organism
  polynucleotide sequence that is cell cycle modulated or involved in the cell cycle process
ccacgcgtccgcacaattcttctacagtacaagaaaccaaaaaaatggcgagtcttaaagttccaacatctgttccagaaccttatgaagatgctgagcaactcaaaaaagcttttgctggatggggtacaaatgaggcacttattattcagattctggcacatagaaatgcagcacaacgcaagttaatccgagaaacttatgctgcagcttatggagaggatcttctcaaggacttggatgctgaactgacaagtgattttcagcgtgcagtgcttctgtggactttgagtcctgctgagcgcgacgcctacttggttaatgaagctaccaaacgtctgacttctagcaattgggttatcttggaaattgcttgtacaaggtcttctgatgatctctttaaggcgaggcaggcctaccatgctcgatacaagaaatcacttgaagaagatgttgcttatcacacaactggggatttccgtaagcttttggttcctcttttaactgcattcagatacgaaggagaagaggcgaacatgacattggcaagaaaggaggcaaatatactacacgagaagatctctgacaaggcttacaatgatgaggagctcatccgaattatttctactaggagtaaagcacagctgaatgcaacattcaaccactaccttgaccaacatggcagtgaaatcaacaaggatctggaaactgattctgatgatgagtacctgaaattactcagcgcagcaatagaatgcttgaaaaccccagagaaacactttgagaaagttcttcgattggctatcaagggtacaggcacagacgaatgggaccttactagagttgtcactactcgggctgaagttgacatggaacgtatcaaagaagagtaccataagaggaacagtgttccattggaccgtgcaattgctggagacacttcaggagactatgaaaggatgcttctggctttgattgggcatggagatgcttgaatggaatatgtgttctaagattggataagaaactatttcctaatgtctgaagtttgaatttgtttgatgatgtgtggcatgtatgcccagagtttggtttgcattatatgggatttaaataatccaggtgttgtgttttggtttttaaaaaaaaaaaaaaaa

SEQ ID NO: 56 - DNA, 1860 bp, Unknown Organism
  polynucleotide sequence that is cell cycle modulated or involved in the cell cycle process
ccacgcgttcgggataacatcattatccttctctcctcttcttccttctttcaaccacaattctcactcccctctttcgtctctcttctccaacttcaatcccattttcaggcaaaaagctgtcatggcttcaatttcagcagcttctgccacagctacagcttctacaaagcttgcatacccttattccccttcttcctcaagcagcagcagcaacactgctgctgtattcccttcaaattcctcaaagcttatcctttcctcttcttttacacccaccccttcaacccttttcctccactcaccaacaactactccttccaccacccacccccgtcggttcactgtccgcgctgcacgtggcaaattcgagcgtaaaaaacctcacgtcaacattggtacaattggccacgttgaccatggaaagaccacactcacagctgctttgaccatggcgcttgcctctatgggcaactccgcccccaagaaatatgacgaaattgatgctgcccctgaagaaagggcgcgtggtattactatcaacactgccactgtggaatatgaaacggaaaacagacattatgcacacgtggactgcccggggcatgctgattatgtcaagaacatgattactggtgctgcccaaatggatggggcaattcttgttgtgtcaggtgctgatggcccaatgccacagactaaagagcatattttgttagctaagcaagttggggtccctaatatggttgttttcttgaacaaacaagaccaagttgatgatgaggagttacttgagcttgttgagttggaggtaagagaattattgtcaagttatgagttccctggtgatgaaattcctattatttctggttctgcacttttagctttagaggctttgatggctaatcctagtattaaaaggggtgaaaatcaatgggttgataagatttatcaattgatggataatgttgatgaatatatccctatcccacaaagacaaactgaattgcctttcttgatggctattgaggatgttttctcgattaccggtagaggtactgtggcgacggggagagtagagagagggactgttaaggttggggaaattgttgatatagttggattgaaggatactaggaatactacagtgacaggggttgagatgtttcagaagattttggatgaagcgatggcgggagataatgtgggattgttgttgagaggtattcagaagattgatattcagagagggatggtgttggcgaagcccggaacaattactccgcacacaaagtttgaagctttggtgtatgtgttgaagaaggaagagggaggaaggcattccccgttctttgcgggttataggcctcaattttacatgaggacaactgatgtgactggaaaggttactgtgattatgagtgacaaaggagaggaatctaagatggtcatgcctggcgatcgtgtaaacatggtggttgagcttatcatgccggttgcatgtgagcaagggatgaggtttgctatcagggaaggaggaaagactgttggagctggtgttattcagaaaatcttagaatgatgaacttgcagctgagcatctcttttcacatgatcggcactttccattgaagttacttaatccattgtcatatatgcaacttcttggttacttttattatgtcttagaatcttactttagtagaagtatcctgttttaaacaccaaattctactgaacttttgggatttttcctcagtctcctctttcatttttcctttgcttgaaaggaatgagaacatttgatttcatgcactttatttaatttagaacaaatgtgcgactctgtttaaaattaag

SEQ ID NO: 57 - DNA, 1356 bp, Unknown Organism
  polynucleotide sequence that is cell cycle modulated or involved in the cell cycle process
ccacgcgtccggtttttagctctgtttttgacacctataaaatgcccctctgcttcattgaactatctccttcctcattctattgacacataggaagaagaggggcgacttgttgtgtaaaagagaaaaaaaaaatgtatgcagagacagggctaatgttcccttattttcagactttcccttctgaagttcaacaatttgaagacttctgttcctctcacgaacctaatgcgtcaatgggatccaacatatcggaatatgacctcgggggagaaggggatctctttaaagctccacaaccaattattgaagaaccattgatgggccttgatcctatgactgctgctatttcaatgatttcttgtgcagaagatgccatctcgccgcaaggactcaaagtttcggatctagaaacttcgtttgagaatgaacaactcctgagtgaagttttctatgaatgcaaaaaagacctatttgacaaagatgcaattgatataccgttctctgaagtcttggacatgaaaattcctattgtgaaggccgacgaaaacctgactgcagatgagaacttggtttctcaagtatctttccagaaaagtattagttcagggtctttaacctccatggattggatacacggggcttcaatgaggcccaattttatagattttggtggaatggactttggagctgtttatggtatgcgaagagcatacagtgaaggagacataaagactctgggtaatggcaacataaatctgatccattctccactgggtcaaccacagattgtcggatgctccacttctgaaattcgcaaggaaaagctctccagataccggagcaagaagaataaaaggaattttggcagaaaaatcaagtatgcttgcaggaaggcattggctgatagtcaaccaaggatccgtggaaggtttgccaagaccgaagaaagctacacatcgaagaagcattaacagttttaactgtctctgagttggaagaattatagtaaggtagttcactggttatattagctgatgatgatataaatagcaaatggaagctagctttagaacaggatctgctcaaataagttggggatccatccatccaacaacttgctagtttgttaaaatctttggggtagcggcaataatctttgtagattagacaaatcaactagtgttgtatatagtgtttgttaaataaaattctgtagcttgctattaatgctggataatgtatttccgatatctctatgttcagcggtccagaccgttactctgtatcttactgacgcaacaatttctgtatcttactgacgcaacaattataactatgcttcagtgtatcaag

SEQ ID NO: 58 - DNA, 480 bp, Unknown Organism
  polynucleotide sequence that is cell cycle modulated or involved in the cell cycle process
ccacgcgtccgctcaataactaaatatatatatagctcagattaatttatcaagaccttgtgaagatgaagacttctacttttcttgcaatgttcttggtcttaacgttggttctccaaggggaatttcaggcgagcgaggcagtgacatgcagtgcctcgcagctaagtgagtgtgtgggggcggtgacgtcgtcacaggcaccatcttcggcatgttgcagcaaaatgagggaccaacagccttgtctgtgtgggtacatgaaggatcccagcctgagacaatatgtcaatagtcctaatgctagaagggttgctaacgcctgtggagttgccgttcccagttgttaaaatacttatgtgtgcaaaagtaaaagcctttattaattactgttgcttgtactaagggaattataagcctatgttgttggccccttttacctaaataaaaaaggttgtgatgctaaaaaaaaaaaaaaag

SEQ ID NO: 59 - DNA, 1646 bp, Unknown Organism
  polynucleotide sequence that is cell cycle modulated or involved in the cell cycle process
ccacgcgtccgctcgcgttttagcagccactggagaaatcaaataggagagagaaggtagtttctagagagagaaaccaaacaaaacaacaccagtttttagagagagaaaaaaagtaaaccggactattctcgaagaaaattttccggtgactgtataaattattttcaagtgaagtttccatatttgtacactcattgtcaattgattgcgttgccgtctccagattctccattaccgatttggtaattaggttttcgagatcggttggttatcatccttcgattcgttaattcgggttaacaggaattttttggtttcgattcgataatcgggttcaagtatttcagaaagagaacagaaaaaggaaaaaggaggtcttaaatctgtttggaagtgaagggggttttggttgaaagatgttgaccaccatggttggtttgtgatgtaatatggcacgggttgttacagataaagatatgtcgttttacattggtcgcgaggcttcaaagttgtggaagagattttgtgcggagataacaacagagatcaatcttcttgctgagaattggaaatatattcttggcggtttgatttgtcagtacatccatggacttgcggctagaggggtgcattactttcatcggcctggaccaattcttcaggacgtcggcttctatcttcttccggagcttggacaagatagagcttacataagtgaaactttatttaccaccatctttctatcttttgtcttgtggaccttccatccttttatttttaagaccaaaaagatctatacagttctgatatggtgcagggtcctggcattcttagtcggttgtcaattccttcggatcataacattctattctacgcagcttcctggtccaaattatcactgtcgtgagggttcaaagcttgccacgcttcctcctcctgacaatattttagaagtgctattgattgttcctcggggcgtgctttatggttgtggtgatctcatattttcttctcatatgatattctctcttgtctttgtgcggacataccagaaatatggaacacgaaggttcataaaacagtgtgcttggttagctgttattgcacaaagcttattgattcttgcatcgcgcaaacattacactgttgatgttgtggtggcatggtacacagtcaaccttgtagtgttcttcattgataaaacgttgccagaacttcctgatcgcactagtgccttgttgcttccagtgaccaaggatagcaagtccaaagaagagaatcacaaactgctgaacggaaattctggagatcctgcagaatggaggcctcgaaacgggaagatcgtggaagatgggaaaacagtgcacgttgaagcagtaattaatggtgcatagacgataaacttcatgcaacaccactaactgatgcttgcgaccttggtacagagattggtaacaatgccattataagttgtgttaatataaatcgttctgggtgttcttccaagttcaatagttttggttttagcgtaggatacgaaatcaaagattgagatgctatcgatgtctccacggtcctctgattttatcaaatgtatcatggaatttattttattttttggttaatgcaatatttcccatccg

SEQ ID NO: 60 - DNA, 1699 bp, Unknown Organism
  polynucleotide sequence that is cell cycle modulated or involved in the cell cycle process
ccacgcgtccgatagatatagatacagaagagagagagagagaggtggtgggtgtgaatatggtatagggcctgagacccctgaaagggcatggaagtgctggccatgctgaggcaactcattggacaagttaaacaactcttacaacaacaaaatacacactctccttcttcttcctcctcctcttcttcttcttctaacttctcttttcctcttcaatcgccaccgcttttacacctcccaaggtgttatgttctgaatcttgatgacagttctgctgaagacagttgctacaatatcattatgactgctggaaaatctgaaaatctcaagatgttggaacctggcaagcctccaccaaaaaagaaagctcggaaggagaggaatcgaggaaaagtgactggaacttcatgctccatagagaatttggatccgcaaatatggaaagaatttcctgaagacttatttgaagctgttattgcaagactaccaattgccacttttttccgcttcagatctgtctgccgcaaatggaactcaatgctgatgtcccaaagtttttctgaacagtgcacccaagttcctcaaccacaaccgtggttctacaccattactcatgaaaacgtgaatactggagccatgtacgaccctatgttgaagaaatggcaccatcctactatacctgcactgccgaccaagttgatagtcttgccagttgcttctgcaggaggtcttgtctgtttccttgatattggacataggagcttctacgtatgcaaccctcttactaggtcctttaaagagttaccagccagatctgttaaggtgtggtctcgtgtggcagtagggatgacattgagtgggaaatcagcttacagtatcctttgggttggttgtgatggtgaatttgaagtttacgactccagaaagaactcttggactcgtccaggatctatgtcctcaaatgttaagcttcctatggcactcaacttcaagtcgcagacagtcaccatcggtaataaattttactttatgcgctcagagcctgatggaatcgtgtcctatgacatggttactgggatctggaagcagttcattatccctgcacccctacatctgagtgatcatacactagcagaatgtgggggccgcataatgcttgtcgggctgctgacaaagaatgcagccacttgcgtgtgcatatgggaactgcaaaagatgactcttttgtggaaggaggttgacagaatgccaaatatatggtgcttggagttttatggaaagcacgttcggatgacttgcttgggtaacaaaggtttgctcatgctatctttaagatcaagacaaatgaaccggctagtaacgtatgatttctcaaccggagaatggatgaaggtccccggttgcgtgttgccccgtgggagaaagaggcaatggatcgcgtgcgggactgcttttcacccccgtcttacagctttggcttaacttgggatgcccagtaaatttctagtcacagcagagtgcgatttattatatcatgtggttttagcttttcccatcataatctgcagcctagtgttctctttgctgaatttattaccactctcttgtataaacatctagttgttaagcttttcattccagaggactaatctacgactacttattattacattaaaaaaaaaaaaaaagggcggcc

SEQ ID NO: 61 - DNA, 1729 bp, Unknown Organism
  polynucleotide sequence that is cell cycle modulated or involved in the cell cycle process
ccacgcgtccgccaatatcagatttctttcatgaactccacttccaatttctcattgcttcttcttcccatttccacctccaaagccatccttccagaaaaccttgttccttacatttcttagccccaaaaaagattcccatctcaattccacaaaaaaacacaaggagatctaaggaaattccccgcctctatatatagagaggtggaattgttcctgaatttggtttgaattgattgattgacagattttggtgagagggtgttattgaaaaaatgggtgacatgaaggataaagtcaaagggttcatgaaaaaagtcacatcttcttcttcaggtaagtttaaaggccaaggtagggttttgggtggttcatcttcttcaggaccctcaaatcatgtcaataatttttcatcacatcccctaaatacaaggcaagatcaacaaccttcatatacaaaaacttcgcctcaaaaaccaagtaattctgatcaaagaattgagaatatatgtgaaattcagttcaacaaaagtgaatcaaaggatggttttgatccatttggtgaattagtcacttctgggaagagaaacccaaaagggtattcacttactaatgtgtttgaatgccctgtctgtggtagtggttttgtttctgaagaagaggtgtcaactcatattgatagctgtttaagttctgaagtgtcttctaatttgggagttgaaagtaaagttgaagttaaaagtgaattggaaacatgtgttagtgcatatgtttcagggaagccctcagaagggtcagttgaagtggtcattaagttgttaaagaatattgtgaaggaaccagagaatgccaagtttaggaaaataaggatggggaatccaaaaataaaaggtgctataggtgatgttgtaggaggagtggagctattggaatttgttggatttgagttgaaagaagaaggtggggaaatttgggctgtgatggatgttccttctgaagaacaacttgttatgcttaagaatgtagtttcactcttggaaccgaagaaggttgaagagttggcgtccttatcccaagttaaggcgagtgaaccagttgagccgaagaagattgatagacagattcgagtgttcttttctgttcccgagagcgtagcagcaaaaattgagctacctgattccttctttaacctctcacgtgaggaattgagaagagaagcagagatgaggaagaagaaattagaagattccaaattattgattcctaaatcttatcgggaaaagcaggcaaaagctgcaagaaagaagtacacaaaatccattatccgtgtacagtttccagatggagcattgcttcaaggtgtctttctaccttcggagccaactagtgctctttatgagtttgtgagcgcagcgttaaaggaaccaagcttagagttcgaattgttacatccggtgcttgttaaaaagcgggtgattccccattttccagctgctggggagagggctgtaacagttgaagaggaggatttggttcctgcagctctactcaaatttaaacctatcgaaacagattctgttgtttttactggtctttgtaatgagcttcttgaaattagcgagcccctcgagaccggatcagttgcttcctcgtaagctctaaattacatcagactttgaattcttctgagtgttggaaaccttataaaactctctgcgccgggaatgct

SEQ ID NO: 62 - DNA, 957 bp, Unknown Organism
  polynucleotide sequence that is cell cycle modulated or involved in the cell cycle process
ccacgcgtccggactttctgaccttgtcaaaaacctctgtgtttctctcacatttctggtcccaatctcttgatatttattggagaagacgatggcagctccaccagctagggctcgagcagattatgattatcttatcaagctcctcctcattggcgatagcggtgtgggaaagagttgtttgcttctgaggttctcagatggttccttcacaacaagtttcatcaccactattggaattgactttaagataagaacaattgaacttgatggcaagcggattaagttacaaatttgggatacagctggtcaggagcgtttccgcactatcacgacagcgtattatcgaggagccatgggtattctgctggtgtacgatgtcacggacgagtcatctttcaataacatcaggaactggattcgcaacatagagcagcatgcttctgacaatgtcaataagattttggttgggaacaaggctgatatggacgaaagcaaaagggctgtgccaacttccaagggtcaagctcttgctgatgaatatggcattaagttttttgaaacaagtgcaaagacaaacatgaatgtggaagaagttttcttttcaattgctagggatatcaaacaaaggctttcggaatctgattccaagactgagcctcaggcaatcaggatcaaccaatcggatcaggccggaacttctggtcaagctgcacagaagtcatcttgctgtggttcgtgaatggagacaatcgtgtgggaagaacgttcgttagttgcatttggatgtaaaaattgattgggatgaaaaactgattcctgttaacttcattaccaaatatttcttcgccatctgatggcaagcttgatgtgtcaaaggcttttctactgtcgttgtgaatctattgtcatgcagttaactagcctgcgttttgataaaaaaaaaaaaaaaaaaag

SEQ ID NO: 63 - DNA, 1219 bp, Unknown Organism
  polynucleotide sequence that is cell cycle modulated or involved in the cell cycle process
ccacgcgtccgaataaatctgcttttggaaacattgtgttgcatccttctcttcagaggagaatagaacacctcgctagggccacagcaaacaccaagtctcaccaggcaccatttcgcaatatgctcttttatggtcctcctggcactgggaaaacaatggttgctagggagatcgcaagaaaatcgggtttggactatgccatgatgactggaggggatgttgcacccctgggtgcacaggctgtcaccaaaattcacgagatattcgattgggccaaaaaatcaaataaaggcctactgcttttcattgatgaggctgatgcatttttgtgcgagcggaatagtacatacatgagtgaagctcagcgaagtgctttaaatgctttactctttcgaacaggggaccagtcccgagacgtagttcttgtccttgcgaccaacaggccaggagatctagacagtgctgtcactgaccgtatagacgaagttatcgaattccctctccctcaagaagaagagcgtttcaaattgctgaagctctatttgaacaagtaccttgctggtgaaggagacagtgacagcaattctaagtgggggcacctcttcaagaagaaccaacaaaagaggataaccatacaagatttgtctgatgatgtgattagagaggctgctaagaagatagaaggattctctggccgtgagattgcaaaacttatggcaagtgttcaagcaactgtatatgggagcccagattgtgttcttgattctcaactgttcaaggaaatcgtagattacaaggtcgctgagcatcaccaacgaataaaactagctgctgaaggtatggagccaacttaccaggggaattaactgacaccacaaagatacaagtgtctttcactgatacgaattgttgaaaatttgtttattatctctttggtagtattgcatgcaaaattcattttttccaaacttaggatattgtagtttaggtgtactatttctgcttggggaatgagcactggatggtggacgtgtttcagggttcaatgggacgttacaatttgatgggtacatagctcacttgggctgtaattgtattgattctgtggatcgcaggaaaatacatccattgaatagataaatagtaggcaaaacatgaagtctctttgaaataggtctctgttatcaaatatcaactaacctatcttttgattacc

SEQ ID NO: 64 - DNA, 1547 bp, Unknown Organism
  polynucleotide sequence that is cell cycle modulated or involved in the cell cycle process
ccacgcgtccgtatcttaatccgactccatctcctatctatctctcatacacttaacataaatccacaatcaaattccccactataacacacacccaaattataaagagagaaatttttcgttctgtggtgtttattattgtttgtgggttttgtaaataaatggggtcagaatcagatgagagggaggtgatattgggtgtagatgggggcaccacctccactgtgtgtgtttgtatgccacttcttctcttttccgaattccctgatcctcttccagttctgggccgctccgttgctggttgttccaattttaatagcgttggagaagatgtagctagagaaacactggaaaaggttatggcagaagcattgcttgatgctggtgtgaaacgatcagctgttaaagcagtgtgtttgggtctatccggtgtgaaccatccaacggatcaggagaaaatattaggctggttgaggagtgcattcccaagtcatgttaagttgtatattcagaatgatgccgtggctgctctagcaagtggcacgatgggaaaacttcatggctgtgttttaatagctggtacaggaagcatttcttatggatttactgacgatggaagagaagctcgggccgcgggtgcagggcctgttttgggtgattgggggagtggctatgggattgctgctcaagcattgattgcagtgatgagggctcatgatggtcgaggtccacaaacaatgctttcgagttgtattctacagtcactaggtctttcttctccggacgaactaatagggtggacctatgcggatccatcttgggctcgcattgcagcacttgttccagtagttgtatcctgtgcagaggatggagatcaacttgcagacgagatcttacataatgcagttcaagaattggctataagtgtcaaagctgttgtccaaagactacgcttggccggggaagatggaaaaggttccttccctgttgttatggttggaggcgtacttggagccaacaataaatggaatatagggaatgaagtcactaattctattttaaagacttatcctggagcttgtgtaattagaccaaaggtagagcctgcagttggagctgctttattggccttaaatttcttgatgaaagaaacagtagctaatggccatagttgacacctgattgtacatagctaactgtgttaactgtataatcattgaagttctctttaatcggtggttccaattctgggagggcatgtccttggatcatggtactgtacttgccttctctttccattgcatatgcagactgctaaaaatgatctgttattcaaatgaacgttgcaccaacttgttgtaacatatctttgtttcctaagttgggcagtcttttggtgctggaggagagggaaggagattgtttggtcatagttgcatttgtattgctgatggttatatagaattcataactgatcagtatgttatgtaatctcttttatagcattctctgttgggataaaaaaaaaaaaaaaaaaaaaaaaaaag

SEQ ID NO: 65 - DNA, 1446 bp, Unknown Organism
  polynucleotide sequence that is cell cycle modulated or involved in the cell cycle process
ccacgcgtccgcaaaatttagaaccccaaaacaatcagtactcctcactcccaatttggccccaatttgaattcaaaatctggaagcattcatgtgactttttcattttttcaaaaactctctctcttctctccctccactctctgtgaaaccctagacacacactccatacgctctcgcaacctctacctctctcttaaatcagcaaacgacagcgatctcatgacggcggtgccgcagtctgccggaagagagctcgcaagcccacccaaggacggcatatccaacctccgattctccaatcacagtgatcaccttcttgtttcgtcttgggataagacggttcgtttgtacgatgcaagtgcgaatgcgttgagaggagagttcatgcacggaggtccagttctcgattgttgcttccacgatgattcttctggattcagtgctagtgctgataataccgttagaaggcttgtgttcaactatggaagagaggatatcttgggaaggcatgacgcaccagttcgctgcattgaatactcatatgcaaccggacaagtgataactggcagctgggacaaaaccttgaaatgctgggatcccagaggtgcaagtggacaggaacgtactcttgttggaacgtatacacaaccagagcgtgtttactctctttcccttgttgggaaccgtttagtagtagcaactgctggaagacatgtgaatgtctatgacttgcggaacatgtctcaacctgaacaacggagggaatcttccttgaaatatcaaactagatgtgtgcgatgttatcccaacggaacaggctatgctctaagttctgttgaaggtcgggttgccatggaattttttgatctctctgaggccggtcagtccaagaaatatgcatttaaatgtcaccggaaaactgaagctggaagggacatagtctaccctgtaaatgcaattgcgtttcaccctatctatggtactttcgccactgggggttgtgatggttatgttaatgtctgggatggtaataacaaaaagaggctatatcagtaccctaaatatccttcaagcattgcagcattgtcatttagcagagatggtagactcctggctgtagcatcaagttatacatttgaagagggagaaaagccccatgagccagatgccataattgtccgcagcgtaaatgaagttgaagtgaagccaaagccaaaggttttgccgaatcctacctcatgaaaactatttcagaagctcctcgatcctctcgagtcgactagtttatcttactttggaaaacaaaaaaactcttatgtacttaatatttcaatttgacttccaggactcatttctcgtagctggaaattctggagaacagtgataaatttgtaattatccagttagcaattgtacctttttcgatgaaaaaaaaaaaaaaag

SEQ ID NO: 66 - DNA, 2834 bp, Unknown Organism
  polynucleotide sequence that is cell cycle modulated or involved in the cell cycle process
ccacgcgtccgtcgcctacatttgagcatgtcctgccccctcttcgtagctgcacctctcctctgaaactcgagaaaaagtacaacaattttaagcttcagagatgctcgaagtatatagaagcagctcagttgagtggaagccgtcgccagtagtagccctagctactagcgccgacgattctcaggtcgccgcagctcgagaagacggctctcttgagatttggcttgtttctccttgctccgtcggctggcactgtcaacttataatacatggaaatcctaattctagggtttcttcgttagtgtggtgtaaatcggggtcgagaaggttggatgcaggtcggttattttcgtccagcattgatggatcagtttacgagtgggatcttttcgatttgactcagaaggctgtgctagattccattggtgtttcaatatggcagatggctgtggaaccatgcaatacttcgcagcttcatcaaaatcttccaaggcagtatgagaatggccatgttaatcatacaaatggtgttagtagtgataatgagagcactgaaggtgaagatgatgatgactcggttgttcttcatgaggatgatgatagtgaaaatggtcaaattgcatttgcttgtgacgatggttgcgttcgaatctacactactgatgagaagaatatgacttacaaaagatcattgcctagggtcagtgggcgtatattgagcgtcacttggagttctgatgcaaagaggatattttctggtagtagtgatgggtttataagatgttgggatgccaagttagcatatgaagtctataggataacagttggacttggaggtttgggtagtgaatctgaactatgcatatggtcattgcttgcgttgagatgtggtaccatggttagtgcagatagtactggtagcgttcagttctgggacacccatcatggcactcttttgcagtcacattcaagtcataaaggtgacgtgaatgctttagcagcatcacccagccataggagggtgttctctgctggttctgatggtcaggttataatttataagctctcaaccagtgaggttgggtctcatgatggagatatttcttctgtagacatgaagaaatgggtttatgttggttatgtgagggcccatacacatgatgtgagggccttggcagttgctgtacccattgctcatgaagagcccgtagctgaacataaggcaaagaagcagcgttccggggagaagccccttgattttagttaccataaatgggcacaattgggtgtaccgatgcttatctcaggtggtgatgacactaaactttttgcatactctgtaaaggaattcaccaggttttctccgcatgacatttgtccttcacctcagaggccacctatacaacttgcagtaaatacaattttcagtcaggcttctttactcttagtccaggctgcgtactggatagatattttttgtgttcgtgtaaaaaagggcgttgtgtctgatagctgtggccagtctggcggggctgcgagaacagatctagtggctcgtgttaagtgcaaaacttcgaggaagatcacatgcagtgcaatttctccttcaggtgtaatgtttgcttattccgactatgtaaaaccctgtctttttgaacttaagaagagtggtgctagcaagagtccatggactgtcagccgaaggcagctccctctgggactgccatttgcccattcaatggttttcagtgcagattcttctcgaatgatgatagcagggcgtgacagaaacatctatgtggttgatgctgtaagcttggaactagttcatgttttcacacctcgtcgtcaagagcattacgaagaattgctaccaaatgaacctcccattaccagaatgttcgctagtgccgatgggcagtggttagctgctgtcaactgctttggagatgtgtatatatttaatcttgagacgcagaggcaacattggtttatatcaagattgaatggttcttctgttacagcgggtggttttactcctcgaaatagcaatgtgcttatagtatccacatcttcgaaccaagtatatgcctttgatgttgaagctaagcaactaggagaatggtccaaccggaatacattctccctgccgagaagatttcaagaatttcctggagaagtgattgggctttcttttgctccttctgctaattcatcatgtgtgattgtctacagttcaagggcgatgtgcttgattgactttgggttgccagttggtgatgatgacgataccaacttagctaatggtcaagatttagctttgacgaagctacatagtactcctgcgaatgggaccttaaagcgcaagccgatagggaatgacttagatatgaaacaaaatggtagaaagaattttgaattctgtgcattcagggatcctgttttgtttgttggacatctttcaagaacttccaccttgatcatagacaaaccctggattcaagtggttaaaactcttgatgcactacctgttcacagacgtatttttgggacataaatctttatcacagtttttgttacagctttactaggaaacgttccgaggggtgtattcaacccctttcactcatatattcttctttgttgtttgttgaagttcgggtggggaaaaagttgaaatcaacactcaagttcaatatagcttcacttcatccgcaggagttctcctatggaaattgcgtagacctgtaaatatacttatgagctttaactagtgtccattagtctgttcagatattgattaatgttttcctgtataacatttattcaag

SEQ ID NO: 67 - DNA, 1312 bp, Unknown Organism
  polynucleotide sequence that is cell cycle modulated or involved in the cell cycle process
ccacgcgtccgcctctgagtacccttgagaagtcagagatcgatcttattcgctgccgggagatctgattacttcacttgttttgttcttttaggaaagatatcggatctgaccgtcaaacaaagtaaaagatgcaggatcaggaagggcatgtggctgatgcaggaaaagaaacattgacatctgttcaaacatctgaaattgaagattggacaaaatacaaggatgatgatattatgcaacagcaatcttccatccaggctgaacaagctgtaaaaactcaatttgttggcgataaggaacctttgtcttcattagaagctgaataccatctgggaaattcaattttgctggagaaaataaaggtgctgagtgaacaatatgctgtccttagaagaacacgtggagatggaaattgctttttccgcagtttcatgtttggttaccttgagcacattctggaatcacaagatcaaagcgaagttcatcgcattaaagctagtattgaggaatgcaaaaagacacttcaaagtttgggctacgcagaattcacatttgaagacttttttgcgttattcctcgagcaactcgataatgttcttcaaggtagcaaagattccataagtcatgaagaactcctacgcagaagtcgtgatccgtccatttctgactatgttgtgatgttcttcagatttgtaacatctggtgaaataaggaagcgctcggagtttttcgaaccatttatactaggactaacaaatgcctcagtggagcagttttgcaagtcatcagtggaacccatgggcgaagagagtgatcatgtgcagattatagccctatcagatgcgttgggtgtaccaatccgtgtcgtatatcttgatagaagctcatgtgagaacaacagcatcaatgtaaatcaccacgactttgttcctacaagcgatggcatggggaatagtggtgtttccaagaccacaaatccatctattaccttgctgtatcgcccaggacattacgacattctctaccccaagtgatgttcttcatttaggggtcgtttggtttgaatacagtttatgtcgggataagttatactggtataagttatgctgggattagttatgctaggattgttttttatccattgtttggtatgttgtattaaatatgacaattgcataatctgtaagaagattgtataccggtgctaattaccccaccctcgataaggtataagttatcccggtgttaattttaatcctgggataacttatacgtggtttgctaaccaaacgaagtattaaggtggcat

SEQ ID NO: 68 - DNA, 1271 bp, Unknown Organism
  polynucleotide sequence that is cell cycle modulated or involved in the cell cycle process
ccacgcgtccggaagaaacgaagccggagaagagggctcttcttttcgtggagaagaacaattataggagtattatcttatacttattcttaccaaagatggatcggtaccaaaaagtggagaagccaagggcaggaacacccattgatgagaatgagattcggattactagtcagggtcgcatgcgcagctatatcacctatgctatgaccttgcttcaggaaaaaggatcagatgagattgtgttcaaggcaatgggcagggcaatcaacaagacagtgaccattgtggaattgattaagaggaggattgttggtcttcaccaaataacgtctattacatccactgatattactgatacatgggaaccccttgaagaaggccttctacctctcgaaaccaccaggcatgtctcaatgatcacaattaccctctcaaaaaaggagctggatttgacttctgtggggtaccaaccaccattgccagcagaccaggtgaaagtgttgacagattttgactatgatggaggatcacctagtggtggacgaagaggccgcggtggtagaggaaggggaaggtctagaggtttctcaggaaatggctttatgttggctgaatacgatgatggcgggtttgatcgcaatcggagctatggtaggggtaggggtcgaggcagaggtcgtagcttccgtggccgtggaaggggagggtacaatggtcctcaggatgcccagcaagacgctgacttctacaatcaagaagcacccatgcagggccgaggccgcggacggggaaggggaactcgtggtaggggacgcggtttcagaactaatgggccgatccatggcggtggtgcttaaagatcaaactttgaagaatacagagattatgtgctatgagtgcctgctccatgttctatgttttttttcccttcagttgttacccgtgttaacagtaggttattgatctgtaatcagagtagactaattatagatttcattaccgcccgtatgtggtgagtttttttgttttttttcttgatatcttctagtattttctttctggtagattaggtgcttgatcaagtgtaatttccttagtgagcagcacattctttaatttgtctgtgttagacatgttcagtgttgacctcagtgcgtaaatttgcctctgtttttagttggcagaatactcaaattacataatttctgctgcgttttatacttctttaactattgaaagtctttgcttttacaaaaaaaaaaaaaaag

SEQ ID NO: 69 - DNA, 2328 bp, Unknown Organism
  polynucleotide sequence that is cell cycle modulated or involved in the cell cycle process
ccacgcgtccgaacagaagctgatcttgtatatatcgtagacgatgacatgattccagggaagaaaatgttgcaaattttagcacatgtagcagggatagacaagtacaagaattctgttttgggaagcattggtaggattttgccatttagacagaaggattttacttttccgagctataggaagtttcgatcaaaggaagcagggctttatttgcctgatcctgcttataatatcactgttgacagaattgttcaggtggatttcctctccagttcttggtttctttcttctgaactagtcaagacacttttcatcgaaacgcccttcactttcatgacaggagaagacttgcacttaagctatcagcttcagaagtatagaaatgctggatcatttgtgctgccagttgatccaaaggacaaagaaacttggggtgacagtgagcacagacttgcttatgtatccgaaaccactgttatattcaaggacactgttcaagtccgagacaatcaatggtggaaagcactctccactggttatgtaacacaatgggcagcaatgaatcctcagaaaattgatgcacttttctatgcccactctgtcgatgaagttaaagctctcgcgcctcttcttgagaaattcaggtcaactgttggaaagaaggcctacattgttgtctcaggaggcagcttctgcccgtgcgaagatgctgttacagctttgaactggcctaaggttgtatgcaaagaaagaagattcaagattatggatttaggagttggtgctctatcaagtatttcaaattcagaagtgcccgtcgttcaagcagtctatgctagcatgaaaggactaatcaacattcataacccgattcttgtgatcacggtagctgatgcagatcctcatgtgaagaaagcactcaagatggctatagaagctaacaccaacagttcatctttagtccttttacctagatcatcggtcactaagcttctttggatggctgatcttcggtccacagcattgccaaattggaatcgtatgaggctttccataaatatcatcacacagaatagagctaattcactagcaaggcttctcaaggctctcagcgacgcatactatataggcgatgaagttcctattactttcaacatggatagcaaagtggatgaagcaactataaagcttgttaactcattcaattggcctcacggacctaaaagtcttcgaagaagaatcatccaaggaggtctaattcgagctgttagtgagagttggtacccttcatcggatgatgattttggcctattactcgaagatgatatcgaagtctccccttactattacctctggatcaaatatgctgtcttggcctaccactatgaccctcaaatatcacttcctgaactctcatcgatctctctttacacgccacggttggtggaagtggtaaaagaaaggcctaaatggaatgcaacagatttcttcaagcaaattcatccaaacacaccttatctccaccaattgccttgtagttggggtgcagttttctttcccaagcaatggaaggaattctatgtttacatgaacgtgaggttcactgaagatccaaagcaaaatcctgttcagataccaaaatcaagaacaaatggttggcaagcttcttggaaaaagtttttgatagatatgatgtacttaagagggtacgttagcctttatccgaactttccaaatcaaacgagcttttcaacaaatcatatggaaccaggtgcacatattgctgctaaagagaatgtggttaagcataacaaggctgattttgaagtgccattgttaaaggaagatttcaagaaccttttgccaaatggaaaaatgcctccggtaacaaagttgccttcattgaacctcttcaatcagcctgtttctctaaagggattaaaagcagcaggagcaaaactagggaaagatgttattcaatgcagtccaacggagatagtagccgttcaccacgacacaggtttaccttcacattgtgcaagattctgaaaactccatactcgtccgatgatcacaaattaattcttttgttttctctcccaaatttgccatgttacattacttggtggaaatgacagttaggaattggtgggagagaaagatgagggtttgattcagctttatttctcatgcaagtaaggggaataaggattctttatgaatgactactgatgagaatgtactcttgtaatattgcagccaaaattggctttctgtatcatcttcttttgcctcattttgcaatcaatgaaagtagacacatca

SEQ ID NO: 70 - DNA, 1045 bp, Unknown Organism
  polynucleotide sequence that is cell cycle modulated or involved in the cell cycle process
ccacgcgtccgtggtggcaaatcattctcttcttcgcggggttcttcatcttcgtcgagggggtattctacgaggagagcagatcctagtttttcgtattcagttccctattatgcgccttctccttttgggtttggtgggggtggtggggtttatgttggcccagctgttggttttgggtttgggtccagtgcctttcttatcatgatgggttttgctgcttttgttttggtttctgggtttctctctgatcggtctgaagggggcagtgtgcttactgctactgacaaaactagtgttctcaagcttcaggttgggttgttgggcttgggtagatcactccaaaaggatctcaaccggattgcagaagtagcagatacatccacatcagagggtttaagctatgtgttgacagagacaacattagcattgcttcgacaccctgattattgcatctcagcttattcatctgttgatgtcaagaggagcatggaagaaggggagaatcgattcaatcaactttccattgaggagcgtggtaaatttgatgaagagacacttgtgaatgtgaacaacattaaaaggaaaagttctacgagccagagggcaaatggatttagcaatgaatacatagtggttacaatcttggtagctgctgaaggcgtttataaattgcctactattaatggaagtggagaattgaaagaagctttgcaaaagattgcatctattccttccagtagaacactagcagttgagattttatggaccccacagaacgaaaatgacacgttatcagaacgagaactccttgaggattaccctctcttgcggcctctgtaagaaaactgggatttcatgcttttcttttactttctaaagatcatataggctgctctcaaccactttttgttatcttcatgtatatagctcgtagagcatcgataatacttgtgtaagaatgagaccaaattttcctaattgtactagtaaaattgttatataaaatgaccagattctccttaaaaaaaaaaaaaaaaaaaaa

SEQ ID NO: 71 - DNA, 976 bp, Unknown Organism
  polynucleotide sequence that is cell cycle modulated or involved in the cell cycle process
tgtacaaaaagcggctggtaccggtccggaattcccgggatatcgtcgacccacgcgtccgcccacgcgtgcgcaaattcgcggtgatgaagaaaatggttactcacaaagctatcaaacagtacaaagaggacgttttgaaccctaataagaaagatttgactaaagaaaagctccccaaaaacgtgccttacgtttcgtctgcgcttttcttcaagtacaacacagctctgggaccgccttatcgagttctggtcgatactaactttatcaatttctccattcagaataaattggatttggagaaaggaatgatggattgtttgtatgccaaatgtactccgtgtataacagactgtgttatggctgagctggacaagctgggtcagaagtaccgtgttgctcttagaattgcaaaagatccccgatttgaaaggcttccctgcactcacaaaggaacatatgctgatgattgtattgtcgagagagttactcaacacaagtgctatattgtcgcaacatgtgatcgagatttgaagcgtagaatacgcaaggtccctggtgtaccaatcatgtacattactcaacataaatactccattgaaaggttgcctgaagcaacaatcggtggagctccaagatattgagtacgtgtttcgagcagtcaaacaatggaatttccaagaccttggatagtggttcgaattcccatcacggctgtcgctgcatagattaccagatctcggtgcgttgtgcaacgaaaaatgctgaagtatcagtcgaatctcaattttgtacccggtggattgttatgtgttcctcaatgataaagaaatatgttcgattttgtttagttagtatctctaggtgctgcccccgtgtgtcttaattaaacagccaatagcggtgtcctaaggcattccaaacagaactataatccatgcctcctttaatgtgtaagggggtggttatcaac

SEQ ID NO: 72 - DNA, 981 bp, Unknown Organism
  polynucleotide sequence that is cell cycle modulated or involved in the cell cycle process
gtacaaaaaagcaggctggtaccggtccggaattcccgggatatcgtcgacccacgcgtccgcccacgcgtccgcaaattcgcggtgatgaagaaaatggttactcacaaagctatcaaacagtacaaagaggacgttttgaaccctaataagaaagatttgactaaagaaaagctccccaaaaacgtgccttacgtttcgtctgcgcttttcttcaagtacaacacagctctgggaccgccttatcgagttctggtcgatactaactttatcaatttctccattcagaataaattggatttggagaaaggaatgatggattgtttgtatgccaaatgtactccgtgtataacagactgtgttatggctgagctggagaagctgggtcagaagtaccgtgttgctcttagaattgcaaaagatccccgatttgaaaggcttccctgcactcacaaaggaacatatgctgatgattgtattgtcgagagagttactcaacacaagtgctatattgtcgcaacatgtgatcgagatttgaagcgtagaatacgcaaggtccctggtgtaccaatcatgtacattactcaacataaatactccattgaaaggttgcctgaagcaacaatcggtggagctccaagatattgagtacgtgtttcgagcagtcaaacaatggaatttccaagaccttggatagtggttcgaattcccatcacggctgtcgctgcatagattaccagatctcggtgcgttgtgcaacgaaaaatgctgaagtatcagtcgaatctcaattttgtacccggtggattgttatgtgttcctcaatgataaagaaatatgttcgattttgtttagttagtatctctaggtgctgcccccgtgtgtcttaattaaacagccaatagcggtgtcctaaggcattccaaacagaactataatccatgcctcctttaatgtgtaagggggtgttatcaaccttgt

SEQ ID NO: 73 - DNA, 1500 bp, Unknown Organism
  polynucleotide sequence that is cell cycle modulated or involved in the cell cycle process
ccacgcgtccgcgaggcaacagatgaagcaggtgtgttgttaactatgagcacgttgactgaagatggcgtgatttcggtgaagaatgcagcttgtgagaggttactgaatcagagggtggaattgaaaatgaagtcgaaaaagttgaatgactgcttgaaccgcttccatgttgctatgccaaaaccacgtgaccagaaagagaggccagcatgcatacctcaggcagtgttggaagccagagctaaggaggctgaggcagatgctgagaaacagaaaaggaaacttgagagagatctggagaatgagaacgggggtgcaggtgtttactctgccagcttgaggaagcactatctattagcaaaagaagagtggaaggaagatgtaatgccagaaattttagatgggcacaatgtctacgactttattgaccctgatatcttacaaaggcttgaagaattggagagagaagaaggtcttcgtcaggatgaagaaggagatgatgattttgagatggacggcgttgagctgacccctgaagaacaagcagcattagctgaaattcggaaacagaagagtttgctcattcaacagcatagaattaagaaaagcaccgcagagagccgacccactgtaccaagaaagtttgacaaagacaaggagttcacttcaaaaagaatgggaaggcagttatctgctttggggctggatccaactctagcaatcaatcgagcccgtagtagatcaaggggtcgtaagcgagagagatcagttgaacgtggagatgacattggtaaggatgcaatggatgtcgacaagattactcccaacaagaagcaaagattgaggtcactttccattacggcaagatcaaggtcaaggtcacgacctccagatgaatttgttccaggggagggcttaaaggacaaagcccaaaagaagatggctataaagatggctaagggttcttctaagaagaggaataaggatgctcggcggggagaggctgatagagttattcctactctgaaaccaaaacatctcttctcaggaaagcgatcaactgggaaaactgaccggcgctagtaaaccaagatggcattttatcttggaatttgctgatggtacctgtcaagatgcttgtgttgcaatatcttgggtggcggacagaaaggctaaaagaaaactcagcttgtgaggaagatgtcaagaattcaatctattgaaatggcaagaccaagactacagattaagtatttaagtttgtgcttaagatgcagctgaacttgctgcctctattatgcatttttggaacttagatacctgttgtaagattgtgtttatcccgatgttaaattttgtctcagatttttttgattttctttagtacagcctttcctctcttttttgcatcaactttctgtttacacgccctaaaaggcgtattcagaaaatgtattcatctgccaatctccttgggatgttttttttttttgggaa

SEQ ID NO: 74 - DNA, 1957 bp, Unknown Organism
  polynucleotide sequence that is cell cycle modulated or involved in the cell cycle process
ccacgcgtccgattgttaattactgcttctgtccccacaccacttaagagcacctcattcatggcttctcccaactcactcaccactttctgcattatccagtgctcattttgctgtaaactacagttatttcttagctgaaaatccaagatttgctgttaattcttgacccttttgccccttcttggattttctgttatttttggattcttttttgtgtcttgaagcaaaggaaggcagaaaatgagaggaggggtcagtggaagtttcaaacttgagcttctggttgtatttatactgcttctttgtatccgagactccaattgcagctcactgaagcatctaaaaggctctctattcaaggacataaaggaggacactcttttgccagagatctccccaaatgctgctccacagccccttcttcccctatttgcaccttctccattggcacctttcacaaacagcactttacccaaattatctggactctgtacgcttaactttgatgctgtgagaagtatgatgaccgtgacatcaatagattgtgtagcaccatttgcacagtatctggctaatgtcatgtgctgccctcaactggaaacaactcttgttattcttattgggcggtctagtaaaaaaacaaatatgcttgcattaaatgggaccctcgcaaagcattgcctttcagattttcagcaacttctggtgagccaaggtgccaatgatactttgcagcatatatgctctctccatccgtctaatcttactcaaggttcttgcccggtcaaagatgttcatgagtttgagacgactgtggactcgtctagcctacttgctgcctgtggcaagatcgatcttgtgaatgaatgctgtgagcaaacctgccaaaatgctatatcagaagctgctaaaaaacttgcacttaaagcatatgatcttttaagcatggatggctctcatgtgctggctgatcacacgaccagagttaacgactgtaaaagtattgtacaccgatggttggcaagtaaacttgaccctgctggagcaaaagatgttcttagaggactttctaattgcaaaaacaataaagtgtgccctctggcttttcctggcatgaaaaatattacaaaggcttgtggagacgggatgaataaccaatcaatatgctgtaatactgttgagaggtatgtctctcacttacaaaggcagagcttcgtcaccaacttgcaagctttggattgtgctgcttcacttggtcttaagctacagaaagccaatgttagcaaaaatgtctacaatctctgtcacattagcctcaaggatttttccgtacaagttgcaccagaagtttcggggtgtcttttgcctagtttaccgtcggatgcaatactggaccaaagtacggggatcagttttgtctgcgacttaaatgacaatattccggctccttggccatctatgtctcagttaccagcttcgtcatgcaataagtctgtgagaattcccgcacttcctgctgcagcatcgggccaaatcagtaaaggattaaatatatggtcacatatgctactgatggcgtcgatgatattgggaatctgctgtatatctaatgctgccaatcttgcttattagctgtattttgtggaagcacattttgaccagaaagaaaattcaaaaattacagttctatgaaggtctctgattgacatcaaaacttaaaatgtacagatgcaggaaaatcatgcacctgagtgaaaatccaactcagagatgattccaagatcaaattcgcgacgaaatttttattccctttctttgggcaataagaaagttgtgaaaaaaattacacagcaggtttagtttcatgtaattatttccacttgacatactttgcctttatgtatttggaattcctcagaaaaaaaaaaaaaaaaaaagggcggccgctctagag

SEQ ID NO: 75 - DNA, 1685 bp, Unknown Organism
  polynucleotide sequence that is cell cycle modulated or involved in the cell cycle process
acagtttgtacaaaaaagcaggctggtaccggtccggaattcccgggatatcgtcgacccacgcgtccgggatcaagaccctatattgcgttatggtggaatgtatgctttagcattggcttacagaggaactgcgaataataaagctatccgtcagttgctgcattttgctgtatcagatgttagtgatgatgtccgccggacagcagttttggcacttggatttgttatgtattctgagccagagcagatgcctcgtattgtatcgttgttatcagagtcttacaatccacatgttcgatatggtgcggctatggcagtaggcatttcttgtgcaggtactggtctgagtgaggccatctcattgttggagcctttgacatcagatgtggttgattttgtacgtcaaggtgctctcatagcgatggccatggtgatggtccagataagtgaagctagtgattcccgcgttggtgccttcaggcgacaactggagaaaattgtcctagataagcatgaagataccatgagtaaaatgggtgcaattttggcctctggtattcttgatgctggtggaagaaacgtgacaatcaagttactttcaaagactaaacatgacaaaattacagcagtcgttggactagctgtttttagtcagttttggtattggtatccacttatatatttcgttagcttagcattctcaccaacagccttgattggtctcaattatgacctaaaagtgccaaagttcgagtttgtatcacacgctaagccctcactatttgagtatcctaagccaaccactgtagccaccacaacttctgctgtgaaacttcccacagctgttttatcaacatcggctagggctaaggcaagggctagcaagaaagaggctgagaaagccattgccgagaaggcagctggaacagagtcatcttctggtgcaccaagttctggggagtccatgcaggtggatactccagcggagaagaaaaatgaaccagagccatcatttgagatgttgaccaaccctgctagggtggttccagctcaggagaaatacataaagtttttggaagaaagcagatatgtgccagttaaatcatcaccttctggatttgtgcttctgagagatctacgtcctgatgaacctgaaatattgtccctcactgatgcaccctcgtcaactgcatccagcactggtggtggatcaactggacaacaggccccggcatcagcaatggctgttgatgaggagcctcagccaccaccggcatttgagtacacatcgtgatttatttgtattttaaaagcttcaccaatactttggttttcattccattttggagacgatgttgaatggcagaggtggaaacctatggatcaaatagcacttcctatgatcgagttgaattgtgggatacattgaaaagagccccgtggatactgttattctgcctcttgatttccagacttgtgcttgtgcttgtcattgtatttcctatgcaagagggactcaaaaactggggactggaaactgccattgcgcgttatctttttctgaatctgtcacgtcagctctgtctggactgttagatttttactttatgttctaattaagattttatattgttcggatctacaaaaagatttccactgttctccccgagtatttatagtcc

SEQ ID NO: 76 - DNA, 1456 bp, Unknown Organism
  polynucleotide sequence that is cell cycle modulated or involved in the cell cycle process
ccacgcgtccgtaaaaccctgcggcctatcggtttatcttctccctccatttccactgtaccatacaatacaatggccaccacttcccttagaacgcccaccactaccgtaaggccgccgtccacccccgtcagcgcctccgcggtgaaacccaattgtatcactttcttatcctacttacaccgcagacgggggcagactgcactacttccccgacggtgtcgtattcaccactccgctaacacaattgttcagctgccgcaccggtcggttgagaaatttatagtctttgcttcaaatggggatgctgctgaggccgctcaaaccgagactcaggaacctgagcaggaggtacaagaatccgagcaggaggagaatgtagatggtgctgctgctgaagatgcttcggatgagggtgacaatgcagctgcagatgaaactgcatcattcattgcaacttcattgcagttgtacagagatgctttagcaaataatgacgattcaaaagttgcagagatagaaatttccctcaagtccatagaagaagagaaaattgaacttcagagaaaagtagcctcattgaccgaagaactgtcaagtgagagcgaccgggttcttagaatcagcgctgacttcgacaatttccgtaagagaacagagagagaaagactttctcttgtgaagaatgcacaaggggaagttgtcgagaaacttctatctgttctggacaattttgagagggcgaaaatgcaaatcaaggtggcaacagagggagaagagaaaattaataatagttatcagagcatttctaaacaatttggggaaatccttggatctcttggtgttgagactgtggagacagttgggaagccattcgacccattgctgcacgaagctataatgcgtgaggattcagaggaatttgaagaaggtgttgtattagaagaatatcgcaaaggtttcaaacttggagacagactcttacgtccttcaatggtgaaggtgtcggctggcccagggccggcaaagccagagacagcggagcctaaagaagagcaaaacgaagtcgaggagaagagtgaggaaggtactgctgaaacagcaggtgatgaagggacaggtgaaggaggtaactaactaccagtgatgatgtgacaagtgagggatgtaacctgtgatttctcttttgtacaagcaaagaaaaggacatatttcctggtttgattgaggttgagataggtttttgctggtatacctttcaattttcattaactactgtttatctgaaaggacatcattttaggtcagtcggcttatgactgctgtcttaaacactattttttgaggctttggatagttgaggattcatatagtcgatcccaactagcttgggatcgaggcgcaattgttgtaatactccggaaacaagagcgtaatgtcatatgccagactgaca

SEQ ID NO: 77 - DNA, 1198 bp, Unknown Organism
  polynucleotide sequence that is cell cycle modulated or involved in the cell cycle process
ccacgcgtccgaaatatgccagggattatttctcgtccgagatgatgttgatgggcaattactacaataaccttggaatgaatttcaatgtaaataataatggcggcggaggaggagggatgttgttttctgggaatccaagtgcgatgacaaacagtggacggagtagcatcaataattcagtaatgagtcagtctggaggttgttcgagttctttttttatcgattcagtgccggggctcaagcatgatactgggctggcggtagagtggacccttgaggaacagtacaaactggatgaaggacttatcaagttcgcgaatgaacccagtataatgaagtatattaagattgcagccgcgctccgtgacaaaactgtacgtgatgttgcattaagatgtaggtggatgacgagaaagcgcagaaaacaggaggactatagtttggggaagaaagtgaaagacaggaaggataaatcagcagaagcatccatgaaaactggtacatcctcagcttcgccattgagcttcattccatattcactctcctcaaatcatcgtaaccatggtgaaaatatcccttctgcagcattacttggaacgagacatctactggaagaaaacaatcaggctctcaatcagatttcggccaacctttcaacagtcaagttgcaggacaacattgatctcttcatccgaacgagaaataatataacggcagttttaaacgacatgagaaatatgccagggattatgagccaaatgccaccccttccagttttgttgaatgaggaacttgctagtagtgttttgcctagtatgactcagccgatgatgtttggctccacaagtggaatccagctgaaacaagagccaggctgctgatgcaaaacgcttggtgttaaatttggattactagcttgtgtaagtacaccaaattttttgctgtaaatgcataaaaagctggcaggtctttgcagcttgggtatacgactgggttccacgggaagaacatttatgagaacctgttttttggaagctgaacatctgaacacaagcaccaggaaatagcagcctcgtgttattgcatatcaggggaaaaactgttatcttgatactgcacttacaagcatttttcttcttcttgtttcagccttctgtgtgtaaatttaggggataaatcgatctcaaaatcgatt

SEQ ID NO: 78 - DNA, 1790 bp, Unknown Organism
  polynucleotide sequence that is cell cycle modulated or involved in the cell cycle process
ccacgcgtccgcggacgcgtgggcgcgaactcagattctcaataatggcggcatcgtacgagtacgaagacggaggtttccaacagcaaccggattcagccgggtacgacccgaattttgtgccggattcggtaaaatcgttcgtggttcatctgtacaggcacattagggagaaaaatgtttacgagattcaccagatgtacgagtcctcttttcagactttaagcgagcgtatgttcaaggaaactccatggccttcagttgatgccgttgcgccttacgttgataacgaccacgttttctgcttgctataccgtgaaatgtggttccgtcacttgtacgctaggctttctcctactcttaaacagcggattgattcttgggataattattgcagcctttttcaggttgtgctgcatggtgtggtgaacatgcaattgccaaatcagtggttgtgggacatggtagatgagtttgtataccaattccaggcattctgtcaataccgtgcaaagatgaagaacaaaactgcggaggagattgcattgctgaagcaatatgaccaggcttggaatgtctacggtgtcctcaacttcttacaagcccttgtagagaaatctacgataatccaaatattggagagggagaaggaaggtcttgaagagtttactgctactgatgggtatgattacagtggtggaagtaatgtcttgaaggttttgggttatttcagcatgataggcttgctcagagttcattgtctgttgggtgattatcatactggcctgaagtgcttgcgtccaattgacataactcaacaaggtgtttacaccagtgttattgggagccacataaccacaatttatcactacggctttgctaatcttatgttgaggaggtatgtagacgctatccaagaatttaacaaaatccttctatatatttataagacaaagcagtatcaccagaagtcaccccagtacgagcagatactgaagaaaaatgagcagatgtatgctctgttggccatatctttgtcactgtgccctcaagtgaaacttgttgaagaaactgtcaattctcaattaagggagaagtatggtgagaagatggcgagaatgcaaagatatgatgatgaggcttttgccctctatgatgaactcttctcatatgcatgtccaaagttcattactccctctgctccaagttttgaggagcctcttgtaaattacaaccaggatgcgtataggctacagttgaagctcttcctttatgaagtgaagcagcaacaattgttagctggtgttaggacctttttgaaagtctattcaacaatctccctggggaagcttgcaaattacatggaagtggatgaacccactttaaggacaattttgatgacatacaagcacaaaacacatgctgtcgattccgatgggaagataacttctaatgctgatgtggacttctacattgatgaagacatgatccgcgtagtagaatctaaacccgccaagaagtatggagattacttcttgcgtcagattgtgaagcttgaagggatcatgactgatattgacaggataaagctggagtaagctatcttcctatgttctagtattagtgctagcttattttgagctttcatttttgtactcgaaagcaagaaggaaaatgcataaagtggaaaaagtatacattttgttgttccccctctgagactgtgttaccggaagttgttgataaatgaccagttaaatccatttttttctaaaaaaaaaaaaaaaaag

SEQ ID NO: 79 - DNA, 1381 bp, Unknown Organism
  polynucleotide sequence that is cell cycle modulated or involved in the cell cycle process
ccacgcgtccgcccacgcgtccgcttttccatcagatttcagctcttttactccacagctgcagcaactacattggtggactttctggtaaattcacttggcttctccaacaaagaagccatttctacaagctccaaggtaactcgttcgacactccgaaattatgagccacaattgttacttgatctctttcacaaagtgggtatgaataaaacccagatcaaaaccctcgtttcttcttcccctgaattgttgttttctcatattgataaaaaccttaaacccaaaattatggttttacaagaaattggcttatctgggtctgaccttgttacatttatcaataaaagcgatttcttgatgagaggtttacatactactattaaaccaagtcttgattatcttcgggagtatttgggcagttatgatgctgtagctagggttattaagaaagagcctaggctgctttccagtaatctccctaaagtaataccacccaatatactattgttgcaaaatcttgggttttcgctaggggatattgagacggtttttcatcggcgtcctaggtatctgcttaataaccctgagtggcttgagagagtagtaaatcaagcagaaaagagttttaacgtacctcgggagtcacggatgtttcttcatgccattgaagcacttgtgtcgcttgatgaatcaaaattagaaaggaaattagatattttccggagttttggatggtctgattctgatatctgtgcaatggtgcgaaaacttccttactgtttgacttcatcagaggctaagataagaagtacattgaaatttttcatgaccgaacttgggtatgaacctagttatctggcttctcatgcaccacttttaaagtacagtatggagaagagggtcaagccaaggaatgaaatcttgaagtttcttaaagaaaaccagctgataaaagggaaactaagtctttacactgccgtgtcatctcctgaatcacgatttcgtaagaaatatgttcttcctttcaaggagaagatgcctgagttgtatgatttatacatcaaaaatacaagctaaagagaggtcttcacagtgtgacagtggctgcagagcagtgcttgtttaagaggtttattcacttcttgataattttgtactttcattttggtgctcttttcaagcatgttgctagtttacctttcattgttgattatacatttatcaaaaaattactgagctatgaaaactagaaattgaggctagtctcattttcaaatcaactgatgtttcttgtttaatgggaaggaaagaagtgtagaaaccagacttgatgtatatgccattgattataaaaaaaaaaaaaaaaaaaaaaaaaaag

SEQ ID NO: 80 - DNA, 1583 bp, Unknown Organism
  polynucleotide sequence that is cell cycle modulated or involved in the cell cycle process
ccacgcgtccgcccacgcgtccgaaaaaaagtaaaccggactattctcgaagaaaattttccggcgactgtgtaaattattttccagtgaagtttccatatttgtatactcattgtcaattgattgcgttgccgtgttcagattctccattaccgatttggtaattaggtttcgagatcggttgtttatcattcttctattcgttaattcgggttaacaggaattttttgatttcgattcgataatcgggttcaagtatttcagaaagagaaacaaaaaggaaaaaggaggtctaaaatttgtttcaaagtgaagggggtttaggttgaaagatgttgaccaccacggttggtttgtgatataatatggcacgggttgttacagataaagatatgtcgttttacattggtcgcgaggcttcaaagttgtggaagagattttgtgcggagataacaacagaaatcaatcttcttgctgagaattggaagtatattcttggcggtttgatttgtcagtacatccatggacttgctgctagaggtgtgcattactttcatcggcctggaccaattcttcaggacgtcggcttctatcttcttccggagcttggacaagatagagcttacataagtgaaactgtatttaccaccatctttctaacttttgtcttgtggaccttccacccttttattttcaagaccaaaaagatctatacagttctgatatggtgcagggtcctggcattcttagtcggttgtcaattccttcggatcataacattctattctacacagcttcctggtccaaattatcactgtcgtgagggttcaaagcttgccacgcttcctcctcctgacaatattttagaagtgctattgattgttcctcggggcgtgctttatggttgtggtgatctgatattttcatctcatatgatattctctctagtctttgtgcggacataccagaaatatggaacacgaaggtttataaaacagtgtgcttggttagctgttattgcacaaagcttattgattcttgcatcgcgcaagcattacactgttgatgtagttgtggcatggtacacagtcaaccttgtagtgttcttcattgataaaacgttaccagaactgcctgatcgcactagtgccttgttgcttccagtgaccaaggatagcaagtctaaagaagagaatcacaaactgctgaatgggaattctggagatcctgcagaatggaggcctcgaaacgggaagatcgtggaagatgggaaagcagtgcacgttgaagcagtaattaatggtgcatagacgacccactaactgatgcttgcaaccttggtacagagattggtaacaatgccattacaagttgtgttaatataaatcattcctggtgctcttccaagttcaatagttttggttttagcgtaggatacgaaatcaagtcaaggattgaaatgctatggatgtctccacggtcccctgtggttaaatttaatgttatcaaatgtatcatggaattcattttattttttggttaaaagcaattattttcttatttccaaaaaaaaaaaaaaaggg

SEQ ID NO: 81 - DNA, 1401 bp, Unknown Organism
  polynucleotide sequence that is cell cycle modulated or involved in the cell cycle process
ccacgcgtccgcccacgcgtccggcaacaacagcaacagcaactcttgaaggctattcctcagcagagaaacccacttcaaccgcaatttcaaccacagaatcatgctataaggtctcctgtaaaaccagcttatgagcctgggatgtgtgcccgtcggctgactcattatttgtatcagcagcaacacagacctgaagacaataacatagagttctggagaaaatttgtcgccgagtattttgctccaaatgccaagaaaaagtggtgcgtctctatgtatggaagtggccggcagaccactggagtttttcctcaggatgtatggcactgtgaaatatgcaaccgcaagccaggccgtggttttgaagcgaccgctgaagtcttgcccaggcttttcaagataaaatatgaaagtgggaccttggaagagctactctatattgatatgcctcgtgaatatcagaattcatctggacaaattgtcctagactatgcaaaagcaattcaggagagtgtttttgagcaacttcgcgttgtacgtgatggtcagcttcgaatagtgttttcacagcctgatctaaagatcatctcttgggaattttgtgctcgacgtcatgaggagctaatccctagaagattgttgatacctcaggtgagtcaactcggcgctgcagctcaaaagtaccaggcagcaacccaaaatggatcatctactgcatctgtttctgagttgcagaataactgcaatatgtttgttgcctcagctcgtcagttggcaaaagctttggaagttccattggtaaatgatctaggttatacaaagagatatgtgcgatgccttcaggtatgcaccttgttctgatgctggaaggtttttattttggcccttttctggaatttggagacattccgcttgtatcaatgtggatatcactacaaattcttgaaatatttgcttctgttagtgcttttaacttcccgaccaggtcatggtttgcctgttctgtgcgtgatatctgactcaaccagttctatccaactttcttatcctctccggcccccctctccttttaatctgtcatcttcccgtggaattcaaagcaaagctgaaaatgaaggtcgaaattcagatttctagcatgtagcagctcagacaaccaagaggttgtgagttcgagtcacccaagagcagggtagggagttattggagggagggagccgagggtctatcggaaacagcctctctacccaccccagggtagggctaaggtctgcacaaactaccctccccagaccccactagtgggattatactaggttgttgttgtaatattggaaattcctactggtaaatctgactcatgagttaatgtgtgaagtagacggaatgatgtggcca

SEQ ID NO: 82 - DNA, 1755 bp, Unknown Organism
  polynucleotide sequence that is cell cycle modulated or involved in the cell cycle process
ccacgcgtccgctgacgcgtgggttccactacatcaagacatctactacactcatcttttttgcacttattgggtgtaaatttttgaaacccagttgagaaaaatgagtgtgttacaatacccagaagggattgacccagcagatgttcagatatggaacaatgcagcatttgataatggagattctgaagatttgtcttcgctgaaacgttcttggtctcctctgaaacccctttcggttaggccatcagattcctttgaatctgatttgtcaagtaaggaaaatcaaactcctttatttgagaattcatctgttaatctctcatctccgttacccataaagccacttaaccctaatggggctctggaaaattcaagactcaagccgaacaagcccaattccaaacagagtcttgatgagatggcggctagaaagagcggaaagggaaatgatttccgtgatgagaagaaaatagacgaggaaattgaagaaattcagatggagattagtaggttgagttcaagattagaggctttgagaattgaaaaggctgagaaaactgttgctaagactgttgaaaagcgaggaagggttgtggcagcaaagtttatggagccaaaacaaagtgttattaagattgaagagcgtatatcaatgagtgcaagaacaaaggtggagcagagaaggggtcttagtttaggaccatctgagatttttactggaacgcggcggcgagggttgagtatggggccatcagatattctagcagggacaacaaaggcacggcaattgggaaagcaagagatgattattactcctattcagccaatacaaaacaggcgaaagtcgtgtttttggaagcttcaagagattgaagaagagggaaaaagttcaagccttagtcctaaatcaagaaaaactgctgcaagaacaatggttacaacaaggcaggcagttactacaattgcatcaaagaagaatttgaaaaaagatgatggacttttgagttcagttcagccaaagaagttgtttaaagatctcgaaaagtctgctgctgctaataagaagccccagaggccggggagggttgtggctagtaggtataatcagagtacaattcagtcatcagtagtgagaaagaggtctttacctgaaaatgataaggatgagagtaagagaaatgataagaaacggtcgttatctgtagggaaaacgcgtgtgtctcaaactgagagcaagaatttgggtactgaaagtagggtgaaaaagagatgggaaattcctagtgagattgtagttcatggaaacacagagagtgagaaatctccactaagcattattgtgaagcctgatttgcttccgcgaattaggattgctcggtgtgtgaatgagactcttagggattctggacctgctaaaagaatgatagagttgataggcaagaaatcgtttttcagtagtgatgaagataaggagccacctgtctgtcaagttttaagttttgcagaggaagatgctgaagaggaataatgtgtaataaagggagctgctaactcttttcatgctctttcaattttcaatcctgccttttaatttttgttcattcgtgccttttaattgaatggggaagcattcttttgcttcctcaaactggtattctagcttctgaattacattgtatggtacaatatgaataaggttttgtcttccggcaggttgtccaagttagtttttagcttaaaatagatgcggca

SEQ ID NO: 83 - DNA, 877 bp, Unknown Organism
  polynucleotide sequence that is cell cycle modulated or involved in the cell cycle process
ccacgcgtccgctttcacaaagcattgtgtgttctgatgggatggaactatctggcacctcctgataactcgaagtcatatcagatgttatctgctgatgaagcaactgcaaaccgagatgatctagttttgtggccccctttggtaataatccacaacactatcacaggaaaacgtgatgatggccgcatggagggtttgggaaacaaggcaatggatagttaccttagaggtattggatttcacaatggaaaggtgaaggccttgtataacagagaaggtcatctaggtgttactctggttaaatttccaagtttaatggatgccatgcggttagcggaatattttgagaaagataaccgcgggagaaaaggttgggctcgactgcagcccgtgactctaggcaaggatgacgagaacaaccctgaccttgtcaaggttgatcataggactggagagaagaagagagtcttctatggttatctgggaactgttagtgatttagagaaggttgatttcgactctcgaaagaagattaccattgctagccgatcagattatgtgacatctggttagaaccacttgaatagctttacattaagatgtgcttcagttgagaattttagtcaattccctgctctagatattctggctttgtgttacttttattgcccttaggaattggggcagctttctctgggataactgtggagctaagttataagtgccatgcatgcgtcttcccctcttctagtgaatctttctgcctagattagcagttttaaagtccaatggactcgctgattgttcttgtccttgtcccgccttcctcggtttgaggctgggtgtaccatttgggtttcgaaaagttcaggca

SEQ ID NO: 84 - DNA, 948 bp, Unknown Organism
  polynucleotide sequence that is cell cycle modulated or involved in the cell cycle process
ccacgcgtccggccgaaaacaatgggaagaggaaagttcaaaggaaagcctactggtcgtcgccagttctccactcccgaggagatgattgctggtacttccgctcgacgtcctcgcacgtttaggcaggaagaggctgaacttgaggaagaagagagatctgaggagtctgaagaggaatctgaagaagattctgatggagagaagaagaaaggtactcagggtattattgagattgagaaccccaatttggtcaagccaaagaacgtgaaagctaaaaatgttgatattgagaaaacaactgagctttcccgacgtgaaagggaagagatagagaaacagcaagctcatgaaaggtacatgaggctgcaagaacaaggaaaaacagagcaagctaggaaagatttagaccgcttggctctcatacgacaacaaagagcagaagctgcaaaaaagcgagaggaggagaaagctgccaaagaacagaagaaggtggaagctcgcaagtaacgaatagtaccatgaaatgttgttttcaattctcctagtacaagatatatccctaccattattggctaatgatggagtttacacttccacctttcgttcatgtcctgtctagtttaaatggagaagagttctctatagaggaaatcatgaaattatactttaagctctgattctgtacacaaaatagatttgtttggccaatatgatgggaggatttaccagtccttttgttgggttgaaataaggttattgcgactaattaaactatcttgcagtgtgtgtgctatgaggagaaatactttccatggaaaatgtttctaaggaaagtggttttttaaaaacttattttcctgtgtttgcttggtgtgtggacgcacgatctttgtatccctgaggtgctttttcaaaagattggaatatataatggtttgagcaggc

SEQ ID NO: 85 - DNA, 1041 bp, Unknown Organism
  polynucleotide sequence that is cell cycle modulated or involved in the cell cycle process
ccacgcgtccgctgctatctgatattagaagtatattggcaacgacacagatgtggcctttatatgttctcgttgagtaagttttcaaggacagaagaagaatactctcaaggatctggaagggatcgtttaagcttggtagagtccttcctttgtaaacgatcagttggcacaaacaaatgccacaatacagtcctctcatgttcgtacttttgtgaagttccacatattaaccagttacattcatgggactgtggtcttgcttgtgttttaatggttttgaggactctcggtaaggattatgatatgcaagaacttgaagagctttgctgcactacaagtatttggactgttgatctggcatatttgaggcagaaattttctgtcaacttttcctactttacagtcacattaggagcaaatccaagtttctgcgtggagacattttacaaggagcaattgtctaatgatctggtccgagttgatatgctattccaaaaggcacgtgatactggtattaatatagagtgcagatcgattagcagtgaagagatttcttcattgatcttatctgggaaattcattgcgattgctttagttgaccagtacaagttaagtcactcttggctggaagatattggtatatcagacttctgcaatgacaacccaggctatactggtcactatgttgtcatctgtggatatgatgctgatacagatgagtttgagattcgtgatcctgccagttcaaggaagcatgtaaaggtctcctcaaggtgtttagaaggggcccgcaaatcatttggaaccgatgaggatcttttactgatccgtttacagaaggaagagactgaaagcagccctttgtgatcgtttatttatttgtgtatgaatgattgtttctctctgactttgtccccgctgcgtattgcccatatcgggtattctttagctgtatgtatattatgtacatcaagggctgtagtatcatgaatttcgcttccctgtatcatgaattttgtatatgatgcttggagcacc

SEQ ID NO: 86 - DNA, 2031 bp, Unknown Organism
  polynucleotide sequence that is cell cycle modulated or involved in the cell cycle process
ccacgcgtccgacttgattctctgctctccccttgactttcacacactcaaattcattttcatatccactctcaaatccagaaatgcaaatcccccatccccacccctccacccccatctccgacgccttcgtccacaagcgcggtaaaaaacgcggtagctacaactgcggccgatgtgggcaacccaaaaaaggccacgtttgccatatctctaacgaccttaataatcatacagatgttcctactcccacaccgaccgatgccaaatcatttgttctcccttctccgctatccgttattcgtcctcagcaacttccacctccgccacgtcagccacttccccagctccggcgagcgctttctttcgatgacgtggatgtcagcgatgatgagtcgcctgtatctgatgatgatgacgtggattgtttggatctggagagtgagttggatttaggtgggtccgggaagttacccgcgagtgctttgtgggaagtgcttaagagattgcctccatcagcgctgctttctgcggcgaaggtgtgtaagggttggagggatgtttctagaaggatctggaagtcggctgaggagctaaggcttggagttcctgtgaaagctcagattgggcttgttggatcagtgttgcagaaatgccctggacttgttaagctttcacttagaatggaaagtgatgtggacgcaacgatgctggcttgcattgcattttcctgccctaatctggattcaatggagatccttacttcagatacctcagttaatcggatcacaggggatgaattaggccgttttgttgctgacagaaggtgccttaccaatctcaagatggaaggctgctcaaatcttggggcctttactctttcttcaaccagcctttccactctttgcctttcggatctcttttgtcactctaagatggtcttcaactgccccaatttaaaggagatttccctggatttttctcgccaagagaaggatagcactgatcttactgctatggtagatggtcttggaaggagctgcccaagactacagaacattcatgttgcatctgttcggcttacacatgctgttgtgcttgctctaacagcagcaaatttaaggggattacgaatgctttccctagtactagggtcagaaataactgatgcatctgtcgctgctattgcatcgagctactcgaggcttgagttacttgatttgagtgggtcaagtattagtgacagtggcattgggatgatatgcaatatatttccagagacattgtctaaacttctccttgctctttgtccaaatatcacttcaagtggcattcaatttgctgcagctcagttgcctaatctagagataatggactgtggaatgaccatatgtgatccagatttagacagtccaacaactcaggaaaatgataacggcgaattacaaagaacaccgattagtaaattacaccttatatatcagaaactgattatcaaacacaaccgcttaaagaaactcagcttgtggggttgctctggcttagatgcattatatctaaattgcccagagcttaatgatttgaacctgaactcctgtacaaacttgaatccagaaagattgctacttcaatgccccaatctggaaagtgtgcatgcatcatgctgtcaagacacattggttgaaactcttcagaatcaggtttgtggtgattttatggctggagacaatcattttccatccaaacgtcttcctgatggctcaaaggatcagagttcctcatttattcagcccccagccatttgatgatgagaagagaaagagaaggatttcaaagcgacggtgcgcggtgcttgtttattagtcaaatacttgtcttgtattggctttgttgtactctagaccaattgtccattatttgttatatagtgatctgaggctaaggcctgatcatgtaattttcattgattaaactatactcaacgtcaatacagggattgtatttcctctatcaataaaaagtacagcagcc

SEQ ID NO: 87 - DNA, 2149 bp, Unknown Organism
  polynucleotide sequence that is cell cycle modulated or involved in the cell cycle process
ccacgcgtccgtctcaatccaaacttcgagttcacatttgccctagctttgagaaatgatcatttgcaaactcaaattattgaattagatcataatagaatccgtaatatacccaaattgtattgttttgttttgatgtgtgttgtgaaaatactgtaaattttgaacaattcgattatggccgatggtaaggtggttaagcgtgtcaagtacaaatcttcagtcaaggaccctggcgtttctggcgttttgaagttgaccaaggaacggtttttctttatgccgaatgacccaacatcaacgacaaagcttaatgtggagttcaagttgattaaaggccacaggtcttctaaagagggttcaagtaagcaggctcttcttaatctcatgcacgatcagggcaggaattatatttttgagtttgatagcttcccggaccgcgacaagtgtcgagaatttgttgcctctgcaattgcggtttgtggagaagttgtgaaagctgcttctgaaaaacctgctgttccacatgatgaacaactcagtgcagcagaaatgggacgtcggattaagttactgcaggagaatagtgaattgcagaaactccacaggcaattggtcattggaggtattctatcagaggctgaattttgggccgctaggaagaagctactggaacagggcgatatcaagaagccaaaacaacgggtggctttaaaaaacgacatgtggagtgtaaaacctttatccgatggccagacgaacagagttacatttaacttgacaccggaggttattcatcagatttttgctgagaaaccagctgtccgccaagcatatttgaaatttgttccgggcaagatgtcagaaaaagaattctggactaaatattcaagagctgaatacctccacagcacaaaaaatattgttgcagcagctgctgaggctgctgaagatgaggagcttgcggttttcttgaagcaagatgacatgttagcatttgaagctcgtaagaagatcagaagggtggatccaactctggacatggaagcagatgaaggtgatgattacatgcatctcccggatcatgggctacctcttgatgaaactaaggagattctggaaccacagtatgaaccattcaagaggtcgttctcgcagtacctcaaccagcatgcagcagtagttcttcgaggaagagttatagatgttgagctgggtgacacaagatctgttgctgaagcattcatcaggacaaatcaggctgaactagctgccgaagtgtctgatgagagtgcatatagagaacgcatagctaaagtttctcgagttgctgaaattgaggatcttcagggacctcatgagccaccagttgcattgctaagtatcaaggatcctcgggattactttgattctcagcaagcaaatgcaataaaggctttgggggatgctggtacagggacaagacagctgaaatttagtgtgagcaaagaagaagccttttgctccttgaagaactccatcttcgagataaattcacaaggattgatcgaaccaataattagtccagaagtagctctcaaggttctcaacgggcttagtcagaatatctcgagtacaaagtatcatctgggaaagaacccccatgagagtgttttagataggctgcctagtgcaacgaaagatgaactattactccattggacatcaattcaggaattattgaagcacttctggtcatcttatccaataacggcaaaatatttctacaccaaggtgactagattaaaggatgcaatgtctcagatataccccaagttgcaggagatcaaggaatctgtgcaatcggatttcagacatcaagtttcccttcttgtacagccaatgcttcaggctttagatgctgcctttgcccattatgatgcagatatacagaagagatctgccaaaagtggggagagaccaaatggatttgcttaggcaaaatttttctccattttcatccgatatttaagctctttgttttctgggggttatatacacgaatgtacatttaacaaaattttgttcgagtgtgttatagcatattctatatcttgacagttctaattgactgcctgcggtaattgtacatctagtggaataatggttg

SEQ ID NO: 88 - DNA, 889 bp, Unknown Organism
  polynucleotide sequence that is cell cycle modulated or involved in the cell cycle process
ccggtccggaattcccgggatatggtggacccacgcgtccgctctttggatgttatggaaggatcaaagtggaatatgactcgaagtggcttttgtggaatgcggtctaaaaagtttgatggcttcatcgatttggatggatatgacacgatagcgcttaaacttaaaggagatggaagatgttatatttctactatatacacagagaattgggtcaatactcctggacaagatgaagataattcatggcaagcattcgtttttgtgccaaaagaaaactggtatattgcaaaaatcccgcttactcgttatgtacctacttggagagggaacatgataaatgcaaagttggagatgaatccagctcgaattcttggcatgtctctatctgtcaacgcagaaggtggagttccaggtgccaagtctgggcctggtgatttccaagtggaagttgattggattaaagccttgcggatgcagtaagcaaaaggggaacatcttaaagaattattagaataggctgggacatttggggcatccacgctcaccagttgagcaagattgtggaaatgccattcagagatggagaagatacaggttctttttctatgtaccttggaggaaaagagagaattgagctgaggaaaggagtgaaaccttaaaatgcagtgactacaggccacaccaccaagtcaaattatcagatttttttcttgtaataaatggggctcttcaatttttctttaggctatcaactagtatggtaaactaagcagtatgtttaataattatatcctcgtctgttacaaggtttggcaatcaaataatacaacaatgtgcttggaatcggtagtactgttaaaagatttaatgtcaatgtgcaatgcgc

SEQ ID NO: 89 - DNA, 1098 bp, Unknown Organism
  polynucleotide sequence that is cell cycle modulated or involved in the cell cycle process
ccacgcgtccgacctcttcacctttacaaacttctacaaatatatttacttcaaacaactgagtagtcctattgtttctgattcgatgtcggttagaacagtgaaagtgagcaatgtctctcttggtgcgtcggagcaagatatcaaggagttcttctcattctctggggatattgagtatgttgagatgataagtgagaatgagcgatctcaaattgcatatgtcacattcaaggatccccagggtgcagaaactgcagttcttctttctggagccacaattgttgatcagtctgtcatagtagccctggaacctgactacgagctgcctcctacagctccagtgccaatcaaggcaactgagagggctaatgcagctggtggtggatctgctattcaaaaggcagaagatgttgtgagcagcatgttggcaaagggcttcatcttgggcaaggatgcagttaacaaagcaaagacatttgatgagaaacaccagttcatatccactgcatcagccaaagttgcttcactagatcaaaaaattggacttagtgagaaaatcaatatgggaacaactattgtgaatgacaaagtgaaagaaatggaccagaagttccaagttactgaaaagacaaaatcagcttttgcagctgctgagcagacagttagcactgctggatcagccatcatgaagaacagatatgttttgacaggggcatcttgggttactggtgctttcaataaggtcaccaaggctgcaggggaagtgggccagaagacgaaggaaaagatggcagaagaagaacagggaagaagttcagctgcaggttacgtgcctatacatgctttctcggagtccccaaaagcttccaaaaccgaggaacctgccaagccctcttcacctaagggcctaattctctagcttgtgcaaaaatatttcaaaactattgttcaattccgcttgtctgatcttttagctgtcattgtgttgtggttagacttagatatgctagttatacataaaatgtcctgtacgattgttgatacatggaacgatagttgctggactattaaattccctgtcggagtgctgtgcgg

SEQ ID NO: 90 - DNA, 1009 bp, Unknown Organism
  polynucleotide sequence that is cell cycle modulated or involved in the cell cycle process
ccacgcgtccggagagtaaaagtggatcctatgaggaagagcgtcagtttgaacaatctctcacagtacgaacagccaaatgctaacaacagcgctgatacatctaaagtggctgaggaaggatatgcctctgcagatgacgctgttcaacaccactccaacagcggtcgcgagcgtaagcgaggagtaccatggacggaggaagagcacaagttattcctattaggattgcagaaagtggggaaaggagactggagaggaatctctagaaacttcgtaaagacacgtacaccgacacaggttgcaagtcatgctcagaagtacttcctccgacgaagcaacctcaaccgtcgtcgccgccgatctagcctctttgatatcaccactgactcggtatcagctatgccaatagaagagggaaaaaataagcaagaaatcccagttccaccagttgtagcatcatcaccaacattgcctactactatagaggctaccaaaaccaatgcatttccagtggcacctatcatgttaccagcacagattgatcagtcaagagaaagtccaactctgttgcaacgaaatcaagtgaattcgtatacgccagttcgccctcttcctatgctttcaatgcccaatccatcaacagtatttgaccttaacgtgaaccagatctcagaagtcgaaccattgtcactgagattatccttgtcacttgatcagggacaagcatcatctactagacaccactcggcatttaaagtaatgccaagcttcagtaatggagagagcatcattagtgtggcatgagatcgaaggatctgtgagaaaaaaatgaaagcaatatggaaagtaaaaataggacaagagtgggtacgctgcactcataattatattaagggaatgtttatttaaggagagattaattgactagacatttggtcctgatttgtacagaccagaaatatgtcatgccttgtggttacctgtttaatgcaacgagtatactgac

SEQ ID NO: 91 - DNA, 1868 bp, Unknown Organism
  polynucleotide sequence that is cell cycle modulated or involved in the cell cycle process
ccacgcgtccgactttttccactgagctccactccaatgtgtaaaaccctagctaaaaatctttaaagttagggtttcaaatttgcaatggggaactgctgcagatctccggcagctgtcgcaagagaagacgtgaagtcttcaaacttctccggcaacgatcacggccggaaagacaagtccagcgccggaaaatcgcaaaaaccggtaaccgtgttaaccgatgtgaaaaattcgaacgttgaagagaagtatttagttgatagagaactaggcaggggcgaattcggaattacatacctttgtatagatcgtaacagtaaagagcttttagcttgcaagtcaatttcaaaacggaagctacgaacagctgtagatgtggaagacgtgaggagagaagtagccataatgaagcatttgccggtgaattcaagtattgtgagctttagagaagcttgtgaggatgaaaatgcggtgcatttggttatggaattgtgcgaaggtggggaattgttcgataggattgtggcgcgaggacattatactgaacgagctgctgctgctgttacacggacgattgtggaggttgtgatgctttgtcataagcatggtgtgattcatcgagatttgaaacctgagaactttttgtatgctaataagaaggaaaattcgcctcttaaagctattgattttggcttgtcaattttcttcaagccaggtgagaggttctctgaaatagtcggaagtccctattatatggctcctgaggtgctcaaacgaaactatggaccagaaatagatatatggagtgcaggagtcattttatatattttgttatgtggggttcctcctttttgggccgaatctgaacaaggtgttgctcaggccatcttacgtggggtgatagatttcaaacgggaaccctggccaagtatttcagagagtgctaaaaatcttgtacggcaaatgctggaaccagatccaaagcttcgactgactgcaaaacaagtacttgaacactcttggcttcaaaatgctaagaaggctccaaatgttccccttggagatgttgtgaagtcaagacttaagcaattttctttgatgaataggtttaagaggaaagctctgagggtgattgctgatttcttgtctaatgaagaagttgaagacctcagagaaatgtttagcaagatagacaccgataatgatggaattgtttcagtccaagaactaaaagctggacttccaaagctcaactcacagctggcagaatctgaagtacaaatgcttgttgaagccattgataccaatggcaaagggaccctggactatggagaatttattgctgtttcactccatcttcaaaggatggctaacgatgaacatctgcacaaggctttctcctactttgataaggatggaaacggttacattgaaccagatgagcttcgagatgccttgatggaggatggagcagaaaactgcgccaatgtggcgaatgacattttccaggaggttgatacagacaaggatgggcgcatcagctttgaagaatttgcggccatgatgaaaactgggacagattggagaaaggcttcacgacattattcaagagggagatttaatagtctaagtgtgaagctaatgaaggatggatcgcttaacttgggaaatgagtaaggtttacattttttcatcaaaatgaagtattgtatcgatgtgtatttgatctcgatgtgtatttgatctctcgccattgttttctggggtgcccattagattgtttgcttgccaggatggaaaaggggcgacttcatctgggtaaccgttgtaaccatttgaaacacagaatgtatccttctactccc

SEQ ID NO: 92 - DNA, 1755 bp, Unknown Organism
  polynucleotide sequence that is cell cycle modulated or involved in the cell cycle process
ccacgcgtccgcttggacttggttacaaaaacagtagccttaaatagtccagctactgcccttgccttgtacatgcaatgcaagtacaggctgccgccatggcgaatttctcaccgttgctattaacgacgatttggctagtgcttgtaatttgtaaaggagtagagagtggtcattcctcagctgttggagatccaggaatgataacagatggcttaaggatagctttagaagcttggaacttttgtaatgaagttggtgaagaagctcctggaatgggtagccctagagctgctgattgctttcatctttctgacagttctctgactcacaaggtaaccgagtcggataataagctaggagttggcaagacattccctggcctgagtcctaaggctaagaataatccggacttatatgctgttgaaaaggaactctatcttggttcattgtgtgaagttgatgacacgccgaggccatggcaattttggatgataatgttgaagaacggaaattatgacacaaaatctggtctttgcccagaaaatgggaaaaaagtgcccccttttaatcctggaagatttccttgttttgggaaaggatgtatgaatcaacctatcttgtatcaccagcccacttcattattagccgatgatattatgcggggaggttttaatggtacctatgatttgggttcttcaacgggtggcagtagttccttctttgaggtgctctgggaaaagaaagttggcacagggggttgggtatttcagcacaaactcagaacctccaaattgtatccatggctgatgttgtatcttagggcggacgcgaccaaagggttctctggaggctaccactacgataccagaggaatgttaaaaactctcccggagtcacctaattttaaggtcaaattgaccttggatgtgaagcgagggggaggaccgaagagccagttttacttgatagatattggcagctgctggaagaacaatggtgctccatgtgatggagatgtgctcactgatattaccagatacagcgagatgatcattaatccagaaactccagcttggtgcagccccacaaatattggcaactgcccaccttttcacatcacaccgaacaatactaaaatctacaggaatgacacctctcacttcccttactcagcttatcactattattgtgctcctgggaacgccgagcacttggaaaagccatatagtacatgtgatccttacagtaatccccaagcacaggagctagttcagttgctgcctcatccaatatgggcagactacggctatccaaccaaacaaggagacggctgggttggggatggaagaacatgggagcttgacgttggtgccctttccagcagactttacttctatcaggatccaggtacacctcctgctagaagaatatggacatctctggatgtggggactgaaatttttgttagcaacaaagatgaagtggcagaatggactctgagcgactttgatgttttaatcacctcgtaaagccataataatgatacccttctatttaacattgtaactgtagccaaagcaaaatcagatagtgggacaaggtctcatcattcttgatgtctaaactttatctttctatactagatctgatctgacggggcaagtcctggcagctttatttccgagagaagaaaaaagaattttgtttttgctttaaaaaaaaaaaaaaaaaagggcggccgctctagagtat

SEQ ID NO: 93 - DNA, 1837 bp, Unknown Organism
  polynucleotide sequence that is cell cycle modulated or involved in the cell cycle process
ccacgcgtccggcttcactatcttgagctggccatattttcatgcttgcaggaactgatttactgctttcgctgggtggcgtttttcaagtttaaagtttaggtcaaactcagaggattcgtcatagtttacatacttttctgctggtcattaacgaaactatgtgtactgaaacacgggggtgattcaattcttctttgtcacagatattaaagctggactaaagcatctacagactggactctatcctgtagttagatatgcagactaagaaaaaattaaatggaagaaatccccgagagctggctagtccaaaggtttcaagacagcagcggaagatgtccgagaatgtgcaaactcaggcaaagcaagttaaggaacttataacatctacagtgaggaagcaaaaatcaggaagcaatttcttgaaaaagattgagaattatgttgctgctacagatctggatgtaagatttggattggtgtctgatgacacttctgctgcttcagacgcacatgatgctgttcatgaatataatactattactattaataaggactataatgttgaaactgatagttgcacaaatgatactatattttctcctaccttccatatatccagaactattggaggggaaatttctaacagagcagacatacccaaattcattgagcaagcagaccagccattgcaggagcctggaaaggaaaatatggaagttgatctgctgacaagtcattttgtgctggacgaggctaccgatatagggggccagcatatctcctctgaagtttcagctgtgcatctctctattaaagattcaaaactggaatgcattgatgaatttaatcaatttcagttgcctgctgatgttagtatggaggaagaggaaactgaagagtttgatgactttgatccatattttttcataaagaatttaccagacttgtactcagttgttccaacatttcggcctgtgctattgcctaaacaaacacggagttgcccatcaaccactcttgttttggacttggatgagaccttggtgcactctacacttgaaccttgtgatgatgcagatttcactttctcggtgaatttcaacctgaaagatcataatgtatatgttcgatgccgtcctcatcttcgggattttatggatagagtatccagcctatttgagattatcatatttactgcaagccaaagcatttatgctgagaagcttctgaatgtgcttgatccaaagagaaaagtatttaggcatcgtgtttaccgtgagtcatgtgtatttgttgatggcaattaccttaaagatctgtcagttcttggccgtgatttagcacatgtgattatcatcgacaactctccgcaggcatttggattccaggtggacaatggtattccaattgagagctggtttgatgaccgctctgacaaagagttgctctctttgctcccatttctggaaagcttagttggagttgaagacgttcgaccgattattgctagcaaattcaaccttcgcgagagaatagctgctgctgctacttgtccttttaactctattagaggtgatgcatttgagagatagggatccgtgtctttatagattcagtcttggttacttgaattttagatttcaatggctctcgatgagttgcaggaatcagttctaatgtacctttgcggatgtgagtttgctagaggctgatctctaatgttggttaatttatgtaattcacatttatgtaatggtgccataacgacgcttgagattggaggaaacttctcaataaggctgtatctgaaacgtgaaatcatccaagcgag

SEQ ID NO: 94 - DNA, 2098 bp, Unknown Organism
  polynucleotide sequence that is cell cycle modulated or involved in the cell cycle process
ccacgcgtccgcttagggttccaaattgctctaaattcccgcggattgagagttcattggagacttccattgttcccagcggctaagatgagccggttgattgagcatcacctagcaaataataaacaggacatgaaagggacagaggtttttgttggtggtttggcccgtactactactgaaagcaaaattcatgaggtattttcttcatgtggtgagattgtggaaatacggttgataaaagaccagacaggcgttcctaaggggttttgctttgtacgatttgcaacaaaatatgctgctgacaaagctctgaaggaaaaatctggatatgtgctggatgggaagaaactcggggttcgcccctcagttgagcaggacactttatttcttggaaatcttaacaaaggttggggtgcggaggaatttgagagtattgtgcgccaggtttttccagatgttgtatctgttgatcttgcacttcttggagatgtccaacctggtcagaagcaacggaatcggggttttgctttcgtgaaattcccatctcatgctgctgcggctcgtgcttttcgggtaggctcccaatctgattttctcattgatggcaagttacatccatctgtacagtgggctgaggaacctgatcccaatgaacttgctcagatcaaagcagccttcgttagaaatgtacctcctggtgctgatgaagattacttgaagaagctctttcagccctttggcaatgtagagaggatagctctatccaggaaaggtagctccaccattggattcgtttacttcgataagcgatctgatcttgacaatgctattatggcgttgaatgagaaaactgtacaagggccaatgggaggtccctcatgcaagcttcaggtcgaagttgctaggccaatggacaagaacaggaaacgaggtcgtgaggatccaaacatgtccagtaccattgagagtcattccaagcttttgaaggatgatccagatgttgagatgattagggctcctaaatcaactgctcaactggagatggattattcggatccttatgaagctgctgtagttgcattacctgtggttgtcaaggagcgtttagttcggatcttgcggcttggtattgctactagatatgatatagatgttgaaagtttaaccagtcttaagatattgccccagtcagctgccatatctattcttgaccagttcatgttgtctggagctgatatgcagaacaagggaggatatctagcttcattaatttctaagcaggttgaaaaactgggaccgaaacaattcgatagtaggtcaaggatagaagatgttggcttgagggtgccagaaccagacaggttctctacaagagttcgtttgccagatctagattcatatgcctcacgagtacccttgcccatgcctaggactgatgtttacacatctcactattcagcgtatttagatccccatctgtctggtcggatgacagcaaagaggatggaggaagcaagttcccatttgcaggcgacttcacttctgtctagtcgggtggcaacgaggatggaggaggcaggttccactttgcagtcgctcctatctggtggggtgacgacaagaaggatggaggaagcaagtccgattttgcaggcaacactccttccatctggtcgggtatcaaggatggatgaagcaagtcccaatttgcaggcaacatggagcccttctcctactaatgacagaattggacttcattcacacattaccgcaactgctgatcatcaacatactcgaccacggatcaggtttgatcccttcactggtgagccatacaaatttgaccccttcactggcgagccaattgttcccaagagctcaagtcatcatcgaagcctgtactgaacgttctgagcattctaatttacaaatggcttattgccaaacctatgtaacataatgatgcgtatttttgttcatccgcagctgtaaaatagtagctgttagcaggattatttggttatgtttctcattgacttcattgattgcgaaggtgcatttggaatctcggcaatcacaatttatagccggtgca

SEQ ID NO: 95 - DNA, 2311 bp, Unknown Organism
  polynucleotide sequence that is cell cycle modulated or involved in the cell cycle process
ccacgcgtccgcccacgcgtccgcaaaccctcccgcgaagctaaatttcccctttttctctctctctttgattcgaataagagaaattgggggtttacagtaattggggttttcgtatatttagttctgtaaactcatccctcgactcgattcttcttttgatttgcattgattatcattagatttgactttgattttcaattcaattctaattgatggaggatactaatcagcagaacgtcgatcgattcacgtctgtttcatcttcaggtgaaagagccgttgagccacataatgctgcagaacagcctatttcgcccaaagatgaaaggactgtttctgcaaatgcttctgtgaatgcaatcatccctggggctttaagaaatgctaaagatcaccctgttacctctgaaactggagctctgtccgccttttatcctctcaattcctattctcctcaggaccaaggtttttactatggaggttacgacaacggcactgggagttgggccgaacaatccaatgatgtcaatgtgaacttgcatgtagttccgccagcaatgtacaatgagaatcccctctttttccctccgggttacggctttgatgctcagatggcatttggacagttctcccccatcgctagtcctctttctccttttatgatagatggccagctatactccccacaccagattccggtttctccaaattactatgcaccacctatttcccctggcttgccgcatgttacatcagctcttccagcttcgcagcctgatctggtggcaccaggaagcactggccatgaaattgatagcatgtattttgggccaggatcaggttactacatacccgttggatcgtttggcggaggcgagctttcgggaagcagcaacattggtttctacaattaccaaggtgaatttggatctggtcaatctttacctaatcgacctaaccccctggactctggaagatacatgtctcaaatgacatctgcggcactatatccacaaccagttggcatacttgggtcgtacgaactaaacgccatgcaggcttcacatcaaggtcttggattcacaccaggctcctcaggcaggaattattcccaaggcaatccttatcctagtgcaaactatggtactgggtctagttctctgtgggaaccaggtcacagaaattggctaactcctgacagaggtggaagacgtgagagggatcggcactctgttaacatttctactgaatcacttggtatggcaagtgaacgaaaccgaggaccaagggcattaaaaccaaagagcaagggtcccattgaggatagctcttcatctgtcatccgtaaagaagttgagtcgactaatactttgcagcctgagcagtataatcggcctgaatttgtcactggttatgaacatgccaagttctttgtcatcaaatccttcagtgaagataatgttcacaaaagcatcaaatatagtgtgtgggctagcactcctctgggaaatggaaagcttgatgctgcttatcgtgaagcaaaagagaggaatgctgattgtcctgtttttctctttttctcggtgaatgctagtggacaattttgtggggttgctgagatggttgggcctgttgattttgagaacaatgcggagcactggcagcaggatcgatggagtgggcaatttcctgttaaatggcatgtcattaaggacgtgcctaacagtcagttccgccacctacttctggaacataatgacaacaaaccagttactcacagtcgagattctcaagaggtgaaattgtcagagggactagaaatgttgaaaattttcaaaaactatgaagcggatacctctatattggatgatttcacctattacgatgagagggagaagtccttgctggaaaagaagagtaaacagcgaacacttcaacctggtagtgctgcagttactactgcagctgacacaataagtcaactagcggatagtcttgccggcacattaaacttggaaggcaacaagaaattgccttaaaaagagtttgtaatgcttaagcctgtagcagattccagaggcaatatcaactgctgtcattcaatgttagttggttgggcaaccagctggctcgtatagttaaggagattgctaacagcattttgggaggtggccttttcatcacctttggatcagaaaactctctttatctctttcctttatttgtcatttgttcaatgagttggttgtgatttgcaattcttgggcaaggagaggcagccagtaatgttatgagctatcgtttaccc

SEQ ID NO: 96 - DNA, 2562 bp, Unknown Organism
  polynucleotide sequence that is cell cycle modulated or involved in the cell cycle process
ccacgcgtccggggttggcaagaaaaattctaaagagaaaaggaggaacacattgattttacgaggactagtcattcatttttcttggacagtcttggaaactaacagcttgattgctgaccctttctcctatcacggctagacagccaaactccacattcttatataaagaccacccttttcattttggatttggtaaaacaaaggaagtccagaagataatcagagaaagatgaaatttgggaaagaatttgcatcccaaattgtccaagaatggcaagaagcctatgtggattacaattatctcaagagtgttttaaaagacatcttgaatttcaatattgccgcttcacctgaagttgaaggctccttaaagagaaggctatctatgtacagagcctttagtggattacaaactagtttcaaagtttctcaaaacaatgaagatgaagccatattagtgagttcagaaggccactatcaaactatgtttcttatgtcatctgaaaaaggtggagaaaatgagatggttttctttaaaagacttgatgatgaattcaacaaggtgataactttttaccagaaaaaagtagaggaagtgaaggctgaggctgatgagttgagtaaacaaatggatgcacttattgctctaagaatcaaggttgataagccttctataagaatcaaaaattcccatttgggaaatccaggtaggtcagaaatggaggcaatacaagaagcagagatgacaagtgaagaagaagaagcaacaagagggaaaagagatacagcaaatacaaaacatatggaatttaggcctgctccactagagattttggaccatataaaaatcaatcttgaacccgaaacacctgtctcaactttaaaaaatatcatccatacttcaaaatccaacttatcattcagcaaagaggagctcagaaaagctgaagaacaaatgagaaaggcttttgttgagttctatcaaaagcttcgacttctgaaaaacttctgtctcttaaatgtgttggcattttccaagatcatgaagaagtatgacaagatcacctcaaggaaagcttctaaatcatacttagagatggttaataaatcttatcttggtagctctgatgaggttgctaagctcatagaaagagtggaggccacattcataaagcattttgtcaatggaaatcgaaggaaaggaatgaaatctttaagaccacaagctaaaagagaaacgcatagagtaacatttttcctgggtttgttctctggcggctcaatagcattagtggcagctattgctgtatccatacatttcggaaaccttctacagcatgagggtcgtgggcagtatatggaaaatatatttccactctacagcctattcggatacattgtcctccatatgctcatgtacgccgggaacatatactactggaggcattttagagtcaattatcccttcatttttggcttcaagcagggaacagaactaggttacagacaagttcttttccttgcttctggtctttcagtacttgcattggctgctgcattgtcccacctagatatggagatggatccaaatacaagaagttttgagacagtgattgagctgatcccacttgccgtggtgtttattctgcttctaataactttttgccctctgaacatcatatatcgttcaagtcgcttcttccttataagatgtggttggcactgtctatgtgctcccctttacaaggttaatctaccagatttttttcttggcagatcagcttactagccaggttcaggcaattaggagtttgcagttctatgtctgctactatgtgtggggcaacttcagaacaagatctaataaatgtcaagaaagcagtgtttatcaaatcttatacatagtcgtcgcaattattcccttttggtctcggtttattcagtgccttcgccgcttatttgaagagaaagattcaatgcaggggcttaatagcctcaaatatttctcaaccattgttgctcttgtgatgaggacactttatgctcaaaagagaggaacgttttggagagtaatggcggcatcatcctcaggaattactacagttgcaaatacttactgggacattgttatagattggggtttattgcaaaagaattcaagaaaccgttggttgagagacaaactgcttgtgccacacaagattgtctactttgttgccattgttcttgacattattctgagactagtatggatgcagttggttcttgattttcaagaactaccatttctgcacaagaaagcaatggttgcagtagttgcctctctagagatccttcgccgaggcatgtggaattttttcaggttggaaaatgagcacttgaataacgtcgggaaatatcgtgccttcaagtccgtaccattgccttttaactacgaggaggacaagagtctatatctatacctctagctgatacgcagaagtcgaaggaatccagggttttcttttctttctttttttttcttgcacaaattcttctgattcgttgccgtatattggt

SEQ ID NO: 97 - DNA, 1205 bp, Unknown Organism
  polynucleotide sequence that is cell cycle modulated or involved in the cell cycle process
ccacgcgtccgaaaccataaacagagcagagagcgattgagagagagagagagaaatggagactgtaaaaaagagtgcatcggcaatggaagcattcgagaagcttgagaaggtaggggaaggtacttacggaaaggtgtacagagcgagagatagggttactggcaaaatcgtagcactgaagaagacgaggcttcacgaggacgaagaaggtgttcctcccactactctccgcgagatctctcttctgcggatgctctctagggatcctcacattgtcaaactgatggatgttaaacaaggccagaacaaagaaggaaagacggttctctacttggtctttgagtacatggatactgatgtcaagaaatttattcgtagtttccgcgcaaatggagaaaacattccccctaaaactgtcaagagcttgatgtaccaactatgcaaaggagttgctttctgccatggtcatggcgtgttacacagggatctgaaaccacacaatcttctgatggaccgtaagacgaatgtgctcaaattagcagattttggacttggcagagcttatactctgcccatcaagaagtacacgcatgagatattaaccctatggtatagagcccctgaggttcttcttggagctactcattactccacagcagttgacatgtggtctgttggttgtatctttgctgaactggtcacaaaacaagccctcttcccaggagactctgagctgcaacaactgcttcacattttcagattgctaggtactcctaatgaagaactctggcccggggtgagcaagctagtaaactggcatgaatacccccaatggaacccccagccactctcaactgctgtccctggtctagatgaagatgggctccaccttctaactgagatgttgcattatgagccagctaagaggatttcagcaaagaaagctatggaacatccctatttcgatgatttggacaaaactcctctctgaagtcccgctcatgacccatctgttgaaaaattgcaaatttctcatcaccggagatcaacaaacccatctaacccctcatcgcaagcttttattgcttttctcaagcatcttttaatagtatcaattagtatgactagcttcacctaaaaactttgtctttctatatcaattggatcagtgtagcacaattatgtggaatgatagaaccgca

SEQ ID NO: 98 - DNA, 1238 bp, Unknown Organism
  polynucleotide sequence that is cell cycle modulated or involved in the cell cycle process
ccacgcgtccgatttcctcggctattttctgcactgactcacgatttttcggacgctttgttctcgccgtagcgcggatattatacactttgtacaatctctgtagtgatcgccgattgatttgccgctccggtgaagttgtccttgccgaaaattttctctcagatcttgtgaggcaggtggctgcagttgttgtaaaggttgaagtagctctagacaaaagcatttgcatgttgaccagatgagcagaactgatgttatttgcagtagaaggaggaggtttcttctcgtcttcagcttctggatatagtaagggcctgacccttctactcttgggtcagaagaacgaagagaagcccatgagagttgcaccgtggaaccagtaccagttggtggaccaagaaactgatccggacctccagctggcttccgggaagaacagggttgtccgcgggtgcgcctcctttgtatgctttggtcgcgctgccgctggacttgagagcccatctccccttaaagtcggtcctacccaacagccagaagtcttgcctagctgtcctgcttctgacaaggacaacaatcagtcgcagtgtgttaatattattgaagacagtcatatctcaccaaaggttgctcttcggagtagcttaaagaaaccagcaaatagtatacccatttctggtggtaatggtaatgaacgcggcacaaattctctaaagattgatgatgcccccaatcctatggagaaaaggaaagtgcagtggacagacacatctggaggagagctttttgagataagggaatttgagcctagtgatgatggtgaatcagatgatgaatttgagagtgggaatgaaagaacttgttcttgcaagataatgtaattttagctccttatagaaggtttcatggctgattttcatgtaggaggcaacaattgaggtgctgcagatgatattacgtgggaggttggtttcgacacatgccttttgctcaactatcagtcgacacaagtgaattttgaggctttattaggtagcgtcacgttgatcatgggcttttctggttttggctgactaatctgttgtctatattcaaattcttgaatgtcagttttgtttctctggggcccgctcgtctattgttttcataattatattttatcttcatttttttaattaaaagatttctggtcctcttttatccaaaaaaaaaaaaaaggacgaccgctgtagggt

SEQ ID NO: 99 - DNA, 2036 bp, Unknown Organism
  polynucleotide sequence that is cell cycle modulated or involved in the cell cycle process
ccacgcgtccgagcatatattcttcttcttcttccttttggcttctatttcattagcttataaaaaccaaaacacaaacccacaaacaaagaaacgttaattagctttgtggagtggagagaccttttattgaaagggagcttaactgttggaccagctgagcactacttgccaaagatttgaactttcttggttttttggactggaagttagataaagctcaaatcttttgggtttattttgtatctggtacagtttcttgaacaagaatagcaggaccttcaaggctgaaaagggaatattttcggcttttttggagtgatttgttggatgatcaggaaattgttttgtatttgagggaagcagttaataaggtagaatagaaatgatggatagggtgccaagattgcttatggaggttctaacagaaccgcaacgaggaggagagtctttactcgggtcgattaagattgctgttttaccgattgcaaaagtttttaccatgtgcttcttgggatttcttatggcctccaagtatgttaatattcttccagctaatggacggaagctcttaaatgggttggtgttttcacttttactgccctgcttgatattctctcaacttggacaagccatcacatatgagaaactgcttcagtggtggttcatccctgttaatattgttatcgccaccatatctggctctattataggttgcatcgttgcttcaatcgtccgtccaccatacccttatttcaagtttaccgttgtacaaataggcattgggaatattggaaatgttccacttgttctgatagctgcactatgtcgggataaatcaaatccttttggagactacgagatatgttcgcgagatggaaatgcatacatctcatttggccagtgggttggtgcaatcgttctctacacctatgtgttcaatatgctcaaacctcctagtgaaggcactttcgacgttcaagatgcaaatcttcctatcaaaagtcctaacaaagatggctcgcagagccatctggtagctagttcaccagagcaagttccattacttacaacagacgtagcaccggctgactcaagtggttcaaagaaagaaaaggttaaagagttctttaattttctatatgagaaactgaagctcaagcaaattattcaaccccctattatagcttctgtcctagccattgtcataggatgtgtgccaatcctgagacgacaggtctttacttctgatgctccactttacttcttcactgacagctgtttgattcttggggatgccatgattccctgcatattgctggctttaggaggcaatcttgtcgatggaccaggacccggaagttcaaaacttggcctaaggacaaccgctgcaattgtctttggacggctggttttggttcctccaaccggacttggcattgtcatgttagctgataagcttggattccttcccgctggtgataaaatgttcagattcgtactcctccttcagcatacgatgcccacatccgtactttctggtgctgttgccaacttgagaggatgtgggaaggaggcagcggcggtattgttttgggttcatatttttgctattttctctatggctggatggatcatcctctacctcaacatactcttttaagttaggatcaaacagtgttgctacaaagagtaaaaagaagagatcttgggatggaaggtttttattcctgttaccaggatcgcgccagcctttcgtaaagctgctgtttttagctcattcaattgcctcattgccatttgagactaagagagagatgtattaatattatgtaggaatattacctactacatctataagtataattagtcatgatggagttaaccaattgctccttatttgttcttggcttcttctactgtataaccttagcttatgctaccttgaaactggctatgtcaaagttggacttggcatttggcagacaaagatgagacatgatgttcattggaagaataagtaaacgttgaacagc

SEQ ID NO: 100 - DNA, 1538 bp, Unknown Organism
  polynucleotide sequence that is cell cycle modulated or involved in the cell cycle process
ccacgcgtccgagcttaagaaaagaacacttgccctgctgagtatctataaccatatagataccagtaccataattttgcatcatcttcaactctaagggatcaaagctttattgtccaaagaaaaaacttatggactcccctcataagccaaggtctttttcacctaacctattctttttcttccttcttgtatcctcaaatctcctgacttttttcatttctaacatatttaagaactcttcttgttctctataccagcaaacatataaagccattgccactgcttcattaaacaatgctatcccttttgttgttaagtcagaaactagagatgttgttcatgtatctgataaaccagcagctgatttagacttaccatctgagttccttgctttcacatctccacatcaactgccatttggagtcaactcgagctttaattctgacaaactcatccctcccgttggccgtccatgtactatgtttccagatttacttcggcgttacatgtcatacaaaatcaatggatcttgtcctgatgatgagctcctggcacagaagctgcttctcaaaggttgtgagcctctccctcgccgtagatgccgtcctgcagctcaacaggaatatgttgagccttatcctcttcctgagagcttgtggattactccatcagattcatctgtagtttggacagcatatacatgcaaaagctatgaatgtctaatcaacaggaaaaaaaatcaaaaagcatttgatgattgcaaagactgctttgatctcaatggcagagagaaaaatcgttggttgtccaaaaagggagctggccttgacttctctattgatgaagtactagcagtgaagaagccgggtacaatcagaatagggcttgacattggtggaggcgtagctacatttgctgtaagaatgagagaaaggaacataacaatattaacaacttcaatgaatctcaatggtcctttcaatacatttatagcatcaagaggagtcgtacctttgtacataagcatttcgcaacgacttcctttctttgacaatacactggatatagttcactcaatgcatgtgctgagtaattggatacccacaactctgctccacttcttattattcgacatctatagggtgcttcggcctggtgggctgttctggcttgaccattttttctgtgttggtgagcaatttgagcaagtctatgctcctcttattgacagcattgggtttaataaggtcaagtgggtcgttgggcgaaagatggacagaggccccgagctgaatgagatgtatctttcagcactgttggagaagccactgaagaactcttggtgatagtattagatgtttcttttactttcttacttttgatagttatagaagagaagatagaaggaggtgtttattttttttaaaattatagattcatttcagatgacatcttctggcataaactagcagtttgaggtagcttgagtatgattttgtaatgttggtgggctaaaccttagagctttagcggcc

SEQ ID NO: 101 - DNA, 1210 bp, Unknown Organism
  polynucleotide sequence that is cell cycle modulated or involved in the cell cycle process
ccacgcgtccgtgatgctgttcatgtatctgataaaccagcagctgatttagacttaccatctgagttccttgctttcacatctccacaacaactgccatttggagtcaacccgaactttaattctgacaaactcatccctcctgttggccgtccatgtactatgtttccagatttacttcgtcgttacatgtcgtacaaaatcaatggttcttgcccggatgatgagctcctggcacagaagctgcttctcaaaggttgtgagcctctccctcgccgcagatgccgtcctgctgctcaacaggagtatgttgagccttatcctcttcctgagagcttgtgggctactccgtcagattcatctgtagtttggacagcatatacatgcaaaagctgtgaatgtctaatcaacaggaaaaaaaatcagaaagcatttgatgattgcaaagactgctttgatctcaatgggagagagaaaactcgttggtcgtcgaaaaagggagctggccttgacttctctattgatgaagtactagcagtgaagaaggctggtacaatcagaatagggcttgacattggtggaggtgtggctacatttgctgtaagaatgagagaaagaaacataacaatattaacaacttcaatgaatcttaatggtcctttcaatacatttatagcatcaagaggagtcgtacctttgtacataagcatttcgcaacgacttcctttctttgacaacacactggatatagttcactcaatgcatgtcttgagtaattggataccaacaacactactgcacttcttattattcgacatctatagggtgcttcgacctggtggactgttctggcttgaccatttcttctgtgttggtgagcaatttgagcaagtctatgctccccttattgacagcattgggtttaataaggttaagtgggtcattgggcgaaagatggacagaggccccgagctgaatgaaatgtatctttcagcactgttggagaagccactgaagaactcttggtgatagtattagatgtttcttttactttcttacttttgatagttacagaagagaagacaggaggtgtttttattttttattttttatttttttttaaattatagattcatttcagatggctcttcaggcataaactaacagtttgaggtagcgtgagtatgatcttgtaatgttggtgcggcta

SEQ ID NO: 102 - DNA, 2088 bp, Unknown Organism
  polynucleotide sequence that is cell cycle modulated or involved in the cell cycle process
ccacgcgtccgcaaaatccacaacaatctcaaattggattttctaatctgtaatattaattacttcattcaaattatgtaaattcttttgtataaaaacccttaaaaacacaatcttttcatcaattctcaattgggtttctcttcttaatctgtaagtttttgttacttcattcaattttgtataatggattctgatttttctcccgggtgtgggtcgggtatacaatcagactttgcgttcgctttcaatgatagcaatttctcggatcggatcttaaggattgaaattgtacccgacttgccggattgtaaaacgggctgtgaaggttgtactggcggcattgatgattgggcccggaaccgcaagcgtaggagagaagacatcaagaaagaaaatgatgcggacgtggtcatgcaacgtgaggagcaagtagtaaattgtaatgtgcttgaaatggaagatggtcttgctgatgatgaacaagatgaagaagctgtaggaatgcttgaggaatcaccctctggcattgagatgaccacaaatccccctggcgatgatgaagcttctaaaagcgatgatgattcatctacaaacatggactcttcaaccccccttcgggtgagaactatacatatcagttctcccattttggcagctaagagtccattcttttataagttgttctcaaatggcatgaaagagtcggaacaacggcatgtaaccatacgaatcaatgcgtcggaagaagctgccctcatggacctcttgaattttatgtatagcaatactttatcaactacaacactcactgccgtgcttgatgtgttgatggctgctgacaaatttgaggttgcgtcatgcatgagatactgcagccacgtactgcggaatcttcgcatgacttgtgaatcagcattgctttatttggatcttccttccagtgtactaatggctgatgcagttctgccgttaacagatgctgcaaaacagtttcttgctgcacgtttcaaggatataaccaagttccaagaagaggtattgaatttgcctcttgcgggaattgaggctgttctgtccagtgacgatcttcagattgcttcagaggatgctgtctatgactttgcgttaaagtgggctcgcatccattacccaaagcttgaggaacggcgggaagtattgagctcacgtctttgtcgactcattcgatttccatgcatgacatgcaggaagctgaagaaagtcctaacatgcaatgattttgatcctgagcttgctacaaagcttgtcctcgaggctcttttttataaggccgaagcaccatatcggcaacgctccattgctgcggatgcagggaatgctttgtgccatcgttacatggagagggcatacaaatacagacctgttaaagttctcgagttcgaagcacctcgtcaacagtgtgttatttacctagatttgaaaaaagaagagtgtgctagcctctttcctgctggtagagtttattcacaggctttccatttgggtggacagggatttttcctgtcagctcattgcaacatggatcaacaaagtgcattccattgctttgggctgtttctgggcatgcaagagaagggggcagtgtcatttgcagtcgactacgagtttgcagttcgtaccaagccaaacgagcaatacatgagcaaatacaaagggaactacactttcactggtggcaaggttgttggctacaggaacctgttgggtgtaggttggagcgcgtttttggctgacgatagtgcttacttcatcaatggacttctccatcttcgagctgagcttactatcagccaatagagagtttaaatactatcgctgtgcttctgctgacagctaaactatactttttacttcagtgaggccttaagaagtttacattgtagtggcatcttacttgaaagtgcagcacatgtgagcaatagttgtatgggctatatattgcttgttacctattggcatatatgcactggtgtaaattagtaaaatcagtctttgagcggttcatattttgacaatcacagtctttgttaagagttctagctgccc

SEQ ID NO: 103 - DNA, 1368 bp, Unknown Organism
  polynucleotide sequence that is cell cycle modulated or involved in the cell cycle process
ccacgcgtccgcccacgcgtccgcgctgagcgtttcaacgacttagcttctgttgattctgatcaactgctttcgatcccgtggattcgtaaactcttggatgttttcctctgttgccaggaacaattcaggtccattgtgtttaacaacactgcttacttgaataaagctcaatggaccgttacattactgattatttcgataggagtgtgaagggtttggatgtttgtaacgcgataagggacggaattgagcagatcaggcaatggcagaagcagatggagattgttttgtgtgcattggagaatcagaggagtgttggtgaaggccaatttcgtcgcgctaagaaggcgttgattgatttgactattggtatgctagacgataaggattctaatgcaactgttaaccatagaaacaggtcattcgggcgaaacaatactcagaatgatcataggtctatggggcattttagatcgttatcgtggagtgtatcgaggaattggtctgctgctaagcagctccaagcaattggtaataatttagttgctccgaaaagtaatgaaattattgctactaatggattagctttggctgtttttacaatgagttatgtgttgtactttgtaatgtgggcactagtggctgcaattccttgccaagaccgcggcctgcaaacacatttttatgtgactaggcaattcgtttgggccggcccaattttgtgtcttcatgaaaggattttggaggaatcgaagaagagggatcgtagaaatgcttgtggattgttgaaggagattcaggagattgagaaatgcgtgcaccaaatgaacgaattgatcgatactgttcagttcccaatcacagaggaaaaagatggagaagtaaaggaaagaattcatgaacttgggcttgtctatgatggtttaaagagtggattggatcctttggagcgccaggttagagaagtgtttcataggatcgttcggagcaggactgaaggccttgactctattggaagatgaaatcatgagtgacaaatttgtgtagaattgggtgatggttgtcttttgagaaggcatctattattagaacatgagcataatatgatatagattttccccttttttttcttttctttgtttgaccctttttttagatgagaagaggagggagaatggttaatggtgtaatgtgcctaaagaataagtagtttaaagaggtgaaaatcatgtattttcactttatatatgtaaagaaattaggaaaaaaggtggatctttggtccatttttggtgatgttcatcttgtttggaattgtataatcacatttctgagttaagttgctttttaaaaaaaaaaaaaaag

SEQ ID NO: 104 - DNA, 669 bp, Unknown Organism
  polynucleotide sequence that is cell cycle modulated or involved in the cell cycle process
ccacgcgtccggttttcttctcatcccaaatcgcactctagggttacgccgcctctatcaggaaatcatgcctcgccgaagctctggaagatctgctcctcgtcctgcccctcgtgcggcccctcgtcctgctccagctccagtacaccatgctcctccaccagctcctatgcaaagtagcggtggtggatccatgcttggtggtattggttctaccatagctcaagggatggcctttggtactggaagtgctgtggcacacagggctgtagatgcggtcatgggtccacgcaccattcaacacgaaactgttgcttccgaggtacctgctgcagcagcagctcctacaaccatcggtgctgggtctgatgcttgcagtatgcactctaaagcgttccaagactgcatcaatagctctggaagcgacattggcaagtgtcaattctacatggatatgttgtccgagtgcaggaggaactcaatgctgaatgcttaagcttgttgtgtctcattttaataactttgaactcattcttaatctgattgttgaaacagcgatggaattatgacaaaaggcttggtggtattgatggagcaagtgaatttggttcttgatacacttttgggtcaaataatttatgctgaaatatgaactttatagacttctta

SEQ ID NO: 105 - DNA, 1261 bp, Unknown Organism
  polynucleotide sequence that is cell cycle modulated or involved in the cell cycle process
ccacgcgtccgcccacgcgtccgcccacgcgtccggccttggctctcactttcaaattcccgacctctttctagcgccgaaattaccagcacgcagagcaaggacaccattagccgttcggccactgacccaaatggaaatcggcggattagactccgatggccgtgaatttagaaacgcggacgagatgtggagagaagaagtaggagatggtgaccaccaaaagaagtctcaatggtataacaaaggcatcaattactgggaaggtgtggaagccacagtggatggtgtgctgggcggatatgggcatgtgaatgaggctgatataaaggcaagtgaggaatttctcaacaccattttgccagaaaggttccctgatgctggaagaggccgccatcttgtagctctggattgtggatctggcattggaagggttaccaagaatcttcttatacgatatttcaatgaggtcgacctactagagcctgtatcacattttttggaatcagcccgggtaaatttggctcctgaaaatttaatggtgtcagagttgcacaaagctgccaatttttattgtgttccactccaggaatttactcctgatgctgaaagatatgatgttatttgggttcagtggtgtattgggcatcttgcagatgatgactttatttcattcttcaagagagcacaggctggcttgaaacctggtggactttttgttctaaaagagaacattgcaaaaacaggatttgtattggacaaagaagataagagcatcacaagatcagattcatattttaaggagctgttcaatcaatgtggactatacatctacaagatgaaggatcaaaaaggatttccagatgaattatttgctgtgaagatgtatgcattgactactgagatgccaaggcaaggtaataaacctagacctaaacggacaactaatagacctgctatcatcagatgatgaatatcacattggtgttgtgtggttttactaactttggatgaagtaattcataggttattgtttttaggtcacatgtatgcgagttctgtcaatgttatgttattgcttttggatataagttatatacattgatagtgaagagatttgttgtgtactttagcttattgtaggttacttcttatgttgaattatttatgcaaccgcttttgtatcaatgtattctgctcttcttgtaaaaaaaaaaaaaaaaaaaaaaaaaaaaaaaaaaaaaccaatttaaaggtctgg

SEQ ID NO: 106 - DNA, 761 bp, Unknown Organism
  polynucleotide sequence that is cell cycle modulated or involved in the cell cycle process
tttgtacaaaaaagcaggctggtaccggtccggaattcccgggatatcgtcgacccacgcgtccgcccacgcgtccgcaaggcttagggatgacgttgcccgataggaatgctaagaaaaaggggaagcaaaaggcttccggtgagtcaaaagactcgcacgtagctgaagctcttgataagcttagggaacagactagagaggctgttaaaggattggaatcagtggccgggccgagacctggtgtagatagcttggggaatgatgcaatgatggaggagtgggttaagcagtttgaggagctttctggatctcaggacatggagtcgatagtagagaccatgatgcaacagcttttgtcaaaggaaatccttcatgaacccatgaaagaaattgaagaaagatatcctaaatggttggaggacaacaaagctaagttgagcacggaagattatgaacgttacagacgccagtatgaacttataagagatctgaacaaagtttacgagactgaacctagcaacttcaacaaaattgtagagcttatgcagaaaatgcaagaatgtggccaaccgccaaatgatattgttcatgagcttgctccagactttgatatatcatctcttggacaactatccccagagatgttggagggccaacagaactgccgtgttatgtgaaaactgaaatgtccccccgcttgaatgtcctgcttgttttcgtcacctttgtcacagtttgcatacaacatttattttgct

SEQ ID NO: 107 - DNA, 1457 bp, Unknown Organism
  polynucleotide sequence that is cell cycle modulated or involved in the cell cycle process
ccacgcgtccgctatacctagatgacatttaccttagcccttaagccaaaaaagaaagaaaagatccattgcctcatcctctgtaatctcatggattcactggtttcaatcctctgcatcttcttcttcttcaatataattcttaccccagttcatgctcaagtgatctttgaggatggttactcagttaagacactgattgatggccacaagatcaaaattaaccctcactccataatttctgtaatgggtgctggcaatttcatcattcttgattctgctgccagtactttttacaccttatctttcaacaaaaactctgaattttctatttcgaagttaactggtagtgagactgctggctatgtggatggttctctggataaggctaagttcaacaaacccaaaagctttgctgttgattcaaaagggaatatttatgttgctgatatttggaacaagcatgcaattagaaagattagcaagtcaggtgttactacaatagcagggggttattcactaaagccaggccgtgctgatggacctggattaaatgcgtcattctcagctgattttgaactttcttttgttcctgagagatgcactttaatgatctctgaccgtggcactatgttagtgcggcaaatacagcttaaggccgaggattgttcaagagattctcattctgctctaagagcagtttctacatggttcttaaccgtggggcttccctgcttggtctgcttgattctcgggttggtcatccgtccttatgttatccctaatgaacatggcagtcgtcttcggcgcaacatgacatggaagcacttcctaatcagtctggagagacaagttctgatgttctgcttcggcatcagaagcgtagttgttgactcaaagatctattcacttttaaggaagctcgtgttacttactttctcccatctgtgcctaatgtttagtcctaaagtagtagtatgccagacttctcgtaaacaactggctcctctcttaagttttgacgactctgaaagcaaagaatcagcaaaatcaccggtggcagctaacattttggaggatttgataacttttgatggaagtttggttaactccgagctgactactaatcaagatgatgcagtgagcaaaagtaccgatgtttctgttgtagatagcatgatactagctaatctaaaagggtttgcagaacaggggattgcttcttcagggcgtgaagtttcatcgagcatttcgagcttagttaaccgaaaaaagaacgtaacttagtgaagtctagcagtagtatgtattactattaacttttgcaactgttctgaaagttcatcggtctatctgctaccactttcatgtacatagtggaacaagcaaatgactcaaggcccttttgagttaatatttcctagcctgtgttttcttggttccaaaaaaaaaaaaaa

SEQ ID NO: 108 - DNA, 1374 bp, Unknown Organism
  polynucleotide sequence that is cell cycle modulated or involved in the cell cycle process
ccacgcgtccgcccacgcgtccgcccacgcgtccggaaaagaatcgcagtttcgaagctatcagaaaatcccaaacaacaaccatgtcttactacccaaaaggctaccacggggaagatgacgacggagctgaattcgacgagtacgatccaactccgtacggcggtggatacgacatcgctttgacttacggtcgtccgcttccaccctctgatgaaacctgttatcagacttcttcagcttctgatgaattcgactatgatcgtcctcagtactcttcttatgctgagccttctgcttatggtgaggaggctcttgagactgagtaccaaagctattctaggcccaaacctcggcccactccttcttatcatcgcccatctgaggaagaaggcgaagcttatgagcagcctcaggccgattatgggtttcagcctgggatgaatcgtcctggcagtggatatggtggggaaagtgaatacggatccgggtatggacgcaagagcgagtatgaagaacccgcttccgaatacggatccgggtatgggagaaagaccgagtatgaagaacccaaaccggaatatgtagaacccgcttccgaatacggatctgggtatgggcgaaagagtgagtatgaagagcccaaaccagaatatggatccgggtatgggcgaaagagcgaatatgaagagcccacatcagaatacggatctggatatgggagaaagagtgagtatgaagaacccgctccagagtacggttcgggatacaggaggaagagtgaatatgaggagccaagatcggaatacgggtcgggttatgagcgtaggaccgagtccgaagagtatggatctggtggatatggaaggaagcccagctacgggcaggaggaagagggggagaggaggcccagttatgggcgttcaagctaccagactgaggagggagaagggtacgagaggcctcgctatggaaggtctgaggaggaggactacaggaagcctagctatgagaggcgtggtgatgacgacgacgagggctatggtcgcaagaaatatggtgatgacaactccgatgatgacgaggagaagaaacatcaccacaagcaccaccaccgcaaacactatgatgattgagcagtgtgctttaatcatctgaaccagatttatgccatactaagaactattacaaaataaaagttggcaagtttgagatacattttgtttgtgaatgtttgctatgatggctggactgtccagttatttatgtgatgtattttgctcttctgcaaatcccagacatttgtcagggttagtatgccatgaatgtgtgaactttatgatcatgatgactcttttatctcttaaaaaaaaa

SEQ ID NO: 109 - DNA, 2528 bp, Unknown Organism
  polynucleotide sequence that is cell cycle modulated or involved in the cell cycle process
ccacgcgtccgcccacgcgtccgcccacgcgtccgcccgagccagacgttaaacgacgtcactttaatgtaccctttccccaaaaattggggctttgtaaattcatttgaacaattcacaaattgtagaatttagggttctttttcagtaatggaaagtgggatttgtagtcccacaagatgaaaagcagtcaagaagaagcgagccgcggcggcgcagcagatgaagaaagtgtgaaatttcacagtgttgtacagccacttagggatttagaatccaactggggtgttgatttagccaaaaatcttgaagaatatttgctcaaaatttgctctggtgaaattactagagataattatgatgatggtcatgtgaattttgctgaagctgcattgctgcttcaggggtcagttcaggtgtacagcaggaaggtggaatatctgtattctctggtattgcattgtttggaattcattaccaagaagagtgaaccagatctaccagcaagtgtatcagcccaagaagatgaaaacggtttgcctgctgccgacaatgaagagaatgatccatactgggcttcagaagaaacctcagtggaagcaaagaacatgttggataatacgacgtgcagggattcttcatttacccagtttgtgaaggcccctgcaaatctggttgtacgcgaggctgactgcttggatgttactggagatgctggagaactagagtcttacctgctagccacgtgtgatctttaccgagattttattctgttggacgcatgtgatgccgtaacagtggatgagtttctgaataatgagaatatagctggaaaggtgctgaacaatagctgcagtgcagagggcctttctttggactccaagtgccacaagagcttttactctcccacaagacgttttgagggaactggcaataagtcttcagctcaaaagaatcaggatgctaatttatatcagtctcaagggtttcatgagtttggtccaggcaattttaacaatgatcagttcgcatctgatatgcctgattacatcgatgatgcacatagatgtgaagatggatattcagaacctagagactcagacgaatcggatgatgaagacccatggaatccgttgaacccgcatgaacctggcactttgaaagtaaaaccatacaaaaaagttaaatttaatagaaggcagggtgcggcgtccaaaaaagttgcatctttggctacagaatttccagttgcgagattacatggtaccactagcgcagacctcaacgacatgtgggagagaaaatgttgtgccatgaaaaaacaaggcgactcacaatctcctccaccatatgagaagctccgggaatcacttcttcatggggagaacaacgattatgatggtttggatagtccaaaggaaaagaatgaaaatgatgactatgatagtgcagatcacgattttgggccttctgcctttgacatgccagaaaatgctgacatgaacaccgatgcaactccttatggggaaaagcacgataaatgtagtccattttttgacagtgaagctcatgaagattcgaatgctcatgccaaccttgaagatctttgtcgctcccacttggattctcttcttgctagccttgctgaaactgaaaagcagagtgaattggctgcacgggtttcaacgtggaaacagagaattgagcagaacttggaggaacaagaatcacatcccccctttgacattcatgaatatggggctagggttttgtgcaagttatccctggaagaaaatggtcaaagcaccaagtctttttctgatgttgtcacgggtcaagagaagcatgatattgctcgaacattttctgcgcttctgcaattggtaaacaacggagatgttggtttggaaagaggtggaatacgtgagtccacttgttacacagctgcaaatcccttctatgtccggctccttaggaatgataatggtagggagaaaatgcagattcggtcatcaagaaagagagcaaaatctccaatacccaatcagggctttagaaaggaaaaaaacaaaggtaaagaagttcaggctgctttcagttcatcaccttcagaacccaactcaaggttaccgatttgccctgaagctgggaaaggttaatggaactcgttgtacgcctgaaggtaagaaaagaaggaaatccagattagtcgtaccaccagatatacatactgcattgtgatatacattttgctctagttttcaagtaagcctctcctctctcgctattcggtctcactgtgcccgttgtatgtgagagactcaaggcagtaattctgtttgagtgtagtaagacagaagattaaccccaccatgaccactgtaattcttatcacaaaccaacaacctgttggctgcagaaatttgtaagatgtgtttattcttaacttaattaggacttactaatagtttggagcagggaggatgtaacaatattttgacatagtgcagagctactcatcatagctc

SEQ ID NO: 110 - DNA, 1336 bp, Unknown Organism
  polynucleotide sequence that is cell cycle modulated or involved in the cell cycle process
ccacgcgtccgcccacgcgtccgccaaaatccatcacgaattgcattttcagatacgtgagtcaactgctaatgggagaacacttggctctatgtgttgatcgtcttatcacacctaaatctttgcactcgttgcaagggtcagaggatgcaggatcctctgcaggaagttcttgctcgcacacagtaggtcaatcaccttatggtactactaataaggaggatgaagaactagaagctggaggtgaagatgagccattacttcagactgtggaatgccgaatttgccaggaagaagatagcactaagaatttggagattccttgtggctgcagtggcagcttaaagtatgctcataggaaatgtgttcagcgttggtgcaatgagaagggtgatataatttgcgagatttgtcatcagtcttatcaacctggctatactgctccaccaccgccttctccttctgaagatattgccatcgacatcagtgggggctggacagtggctggtactcagcttgacttgcatgatccgcggcttcttgcgatggcagctgcagagcgccatctcttggaggctgactatgacgagtatgctgattcaagtgctagtggagctgcattttgtcgttctgctgctttaattttaatggcccttctattattgaggcatgctgtgaccatcggaaatgatgatggagatgacggtgatgtctccacctttttctctcttttcttgctccgtgctgctggttttcttctaccttgctacatcatggcttgggctatcagtatcatgcagcgtcgaaggcaaagacaggaggcaacagcacttgcggcaacagaagttgctttcatgctgcaggcagggcaacataggggcttgcatgtaacaatagcaccaggacctgcacagttagctgaaccttcagcaacaccagcacacccaactactcatgttgcaacaccaaccgcccaggcgacatcccctcctccagagatggtataaatggctttgctcagtttgcttgttataaaatagttgccgataggggcattttactgttggtaagttgcacaagatggggatgagtagaagggtagaggagtattcttttccctttttgctttttcgatttattagctgtatctttgcattgccaaatttggagtgcagaggctgaaactttttccatttgttcaatttttcattaatgcttgaacatgtaaaaatataatagcgaacttagctgctttcaatgtggagataccatatcttcacatcgtgtacattgtttatatattaccattatgggttactcttaaaaaaaaaaaaaa

SEQ ID NO: 111 - DNA, 1122 bp, Unknown Organism
  polynucleotide sequence that is cell cycle modulated or involved in the cell cycle process
ccacgcgtccgatgagacttggagggtgtcctctggtttagctgaggcatggcgagacaacacaaatgttgcatccaagaaaaagtcattttccattgaaactgaaattgatgatgaggcgactagttatgcgtctttgaacgaggacggtcatgactttgatgagattgaggatatgaggatacgcgggaacttgttttacaagcttgataaagattccaaggaatacgaagaatataagtttgaattccatagaaggaatacgaacaagaataatggaaatgacggtccaaaagagaaggaaaaatcgaataacgtttcagcttctagggtcgagaaaggtctaaagggtatagatgagaagcagcaaaacaagaaagagaaactgagctataactctgcctctccgtttcagaattttcagctaaatgatttcggagcatctccaataaagaggttaagggttccaacttttaatcagcttactgccccttatcatgagccgttttgtttggatatttatgtgtcgaaaggttcagtaagtgctagcattatccacagagctactagcaaggttgttgttgtggcgcactctatttcaaaggacatgaaatttgacttgggatcaactaagaatagagctacttgtgctgctattggggaagttctggctcaaagagcactggctgatgatattcataacgtagtttatacgccaaggaaaggggagaaattggaagggaaacttgagattgtacttcagtccattattaacaatggcatcaatgtgaaggtgaagattaagcagaggaaaaccaagaaacctggcttccaccgcccgacagcttaggtggtcatcctacattacgtaggatgaaattaaaagtgacaaggaagttttatcaacgtcttataagctcgaaacagcgcaatgtagtaagtagaacaaggtcagagatgtattactacctcttttgcgaggttgcagaacatttccctaaattcagtctttaaatcggtttcaatagtagttacaaacttgggaataaatcttttatttcctgcaatttgtattctctttatgagaatacattgctgttaatgtaaaagtgtgactcgcag

SEQ ID NO: 112 - DNA, 1098 bp, Unknown Organism
  polynucleotide sequence that is cell cycle modulated or involved in the cell cycle process
ccacgcgtccgcccacgcgtccggctggaactttgctgtatcatcttcaaactcttgattagttatattaaagactagtctttaaactcaatgggtgatagtcagtactctttctcactcaccactttcagcccatctggaaagctggttcagattgaacatgcattgactgctgttggatctggtcaaacttcattagggattaaagctgctaatggtgttgtaattgctactgagaagaagttaccatccatcttagttgatgaagcatctgtgcagaaaatacaggttttgacgcctaatattggagttgtctacagtgggatgggccctgattctcgagttttggttcggaaaagtagaaagcaggctgagcaatatcaccgactctataaagaaccaatccctgtcacacagctggtgagggaaactgctgctgtcatgcaggaattcacccaatcaggtggtgtaaggccatttggtgtttcactcttggttgcgggatttgatgacaagggtccccaactatatcaggtggatccatctggttcatacttctcttggaaggcttcagctatggggaagaatgtctctaatgcgaagacatttctcgagaagaggtacacggaggatatagagctcgatgatgctgtacacactgctatactgactctaaaggagggattcgagggacagatctctggcaaaaacattgagattggcattattggaactgacaaagtatttaaagttctcacgccagcggaaatagatgattacctacaagaagtggaatagattttcttttccgcttaaggcattggaaaaagttgtcaggttggaagcgcagacggggtcatagcacaactattggatgttcttgttggcttgattatcacttgactttaatcaaactagacttagttgtatgttggccatgttgtggttatttattgcctgatgtatggctctgaaaagttatatgggttttcttttctcagtttcttgaacatactgattgttctatgttacctgaaacacatgacagtagagaaaagcattatattatttgagcaaccctcttacgtctgagaacgg

SEQ ID NO: 113 - DNA, 1105 bp, Unknown Organism
  polynucleotide sequence that is cell cycle modulated or involved in the cell cycle process
cgtccgaaatggcggaagacaagaaagagtcaacgtcgagttcgccgctccaagaagatcccgaagatcccgtcaaatcccctccttcttcccccaattcctccactcgcaaggcttgctatgctgttcttcaaagttgggtgtcaaagaagttcatgactggatgcgtggtcctcttccccgtggctgttacatttttcatcacttggtggtttattcaatttgttgatggtttcttcagccccatatatgaaagacttggtattgacatatttggccttggatttgtgacatcgataaccttcatattctttgtcggtatttttgcttcatcatggctgggttcaacagttttttggataggggaatggtttataaagagaatgccctttgttaagcatatatactctgcatccaagcaaattagttctgctatttcaccagaccagaatactaatgcattcaaggaagttgctataattcgtcatccccgaattggtgaatatgcgattggtttcataacatcttcagttgttctccagagagatgatggggatgaagagttgtgcagcatttttgtccctacaaatcatttgtatataggagatgtatttctggttaattcaaatgatatcatcaggccaaatttgtctgtgcgagaaggcatagagatcattgtttctgtgggaatgtcaatgccgcaggtgatttctcctatagaaaggatcacacgacagaccgaccggatccctctaaacagaatgttaaagtaaacagaatcatcatctcatttgcttctggtttgcgctaagctaccataatctcatttttttagggaagtcgcatatgtatactgttggtcttctatgttcatttgatggttcagcagatctgaactggagcaattagcaacattggtgactttgttgtgtgtttattctttaggattagtaggaggagttctgtttgtcggaaacaaataggtagggaggcattgtttggctgtagctggtttactctaattaacatttcaccgtggtctgtacagtcttgtaacttatgagttcttgtgtttgtattataaagaggctatcagtgttatcgc

SEQ ID NO: 114 - DNA, 2310 bp, Unknown Organism
  polynucleotide sequence that is cell cycle modulated or involved in the cell cycle process
ccacgcgtccgcccacgcgtccgcccacgcgtccgcccacgcgtccggcagcctacagtccatattcacgtgctacatcccctgccccaactttggggcatgatggccagctctatggatcacaacaataccactatccgtatttccagcccctccctccaaccagtaattcgtacactactccagttgccctgccaaaaggtgagattgccacctctgctgctgctgctgaccatgcatcgttgtctgttgattctgctaatggaatttctaatggcattgccaatggtggtgtaaagggaaatgctgggcctacgcttgtgaggcctgcattccagaacccatccgtaaatgctaatggttcttatggacggggtgcgttgcctggaggagctgcttcaggttatcacgaccctagattaggttttgatggtgtgcgatctcccattccatggatagatggatcaatgttcactgacgggcaaggtaggctagtgtcgagcaattcttttacaccatctttttcaaatggcagtgccgttccatcatcaaaaaatcagaatgttcatccgcatctaatgggcttccaccacccaaggccctcttctggcatgaacacaacaaatgggtatatgaataggatgtaccccaataaactgtatggggggcggtattgtaacacattcggtactggcatgggctttggatccaatggatatgatacccgtaccacaggtcgtgggtggatgacggttgacaacaagttcaaacccaggggtagaggaaatagtttctacggtaatgagaacatggatggtttaaatgagctcaacaggggacctagaggtaaaggtttcaagaatcaaaagggttttacaccagtaacgctggcagtcaaggggcagaacgttccgctcaccctaaccaatgatgctgagaaagaaaaaccaagcctgattcctgacagagaacaatacaactgtccagattttccagtgacatatactgatgccaagttttttataatcaagtcttacagtgaggatgatgtgcacaaaagcatcaaatataatgtttgggctagcacaccaaatggtaacaagaagcttgattctgcttaccaggaggctaaacaaaagtctggtggttgccctgtttttcttttcttctcggtgaatacaagtggtcagtttgtcggtgttgcagagatggtaggaccagttgatttcaacaagagtttggagtattggcagcaagacaagtggatcggctgctttcctgtaaagtggcacatcgtgaaggatgtaccaaacagcttgttgaaaaacatcacgctggagaacaacgaaaacaagcctgttaccaacagtagagatactcaggaggtcaaaatagagcagggcctacaggtgattaagatatttaaggatcatattagcaaacagtgcatccttgatgattttgagttctatgaggatcgtcagaagagaattcaggaaaagaaggtcaagcagcagctattccagaagcagtcgcaggtatgggaaggcaaagctactgaagagaagaagaaagaaaacacgaaagtggaacctaagtcccagaaaccttcagaagttcctgctggtttgaacaaggaaagtttacccgctgctccgactaatggggaggtgaagcttacagaaaatggatcagttacaaagggagatgatatgaagggtgctaaaccagtcactgtagcggaaaagaaacctgtagctatagggatagcaaaaggagttgctaatggatgctagcttcacctaatgaagggggaggtctgtggttaaagaagccctaaattggagcttgttgactacatgatatgcacgccagtgcttggttagatctcataaccattggactgccccttttatcctagctgcatttggagttggttcttgcattaagaaatccccggagataaatcaatagtggcaaggctagttcaatctgtttctaagagttcaggaagtatggaagctccattttccctcaggttttagcttctgacaggtttcataccttggtttgggttttaggataatttttttttataattttgttttcgtcatgtggcttattttggtcaattttcccctttttttaaaagttatttgggttttaaagggtggggttcttgttattattagtttggctcccaatcctatcttgtaaatctagatcaatctgttgcggcagttcccaacattgcttttttgtactaatgattgagctagaagctagttttaaatgtcaagtctctaccgg

SEQ ID NO: 115 - DNA, 2089 bp, Unknown Organism
  polynucleotide sequence that is cell cycle modulated or involved in the cell cycle process
ccacgcgtccgcccacgcgtccggcgggatttgtgagtatttgaatgaggaaaaagggtgtccagtgtgatgagatatgagggttaagattgtaggaaaatgggttgtgtatttgggaaagagatttcatcttctgagacacctaatggggaggttgtagttggaagtaggagagaaaatggggtagatagagatttggctgccccatctgggaggagagagaaagttggtactgtaaataaagtggatgccgtaggtggcggcggaggaggtagtgatgttggtgaagttgtgaatggtagggatcagaaggatgagaagaagggtgagaatgcaaggcataggggtgagaggagaaggtctaagcctaatccaaggctaagcaacccacctaagaatgtgcacggcgagcaagtggcggctggatggccgtcatggctttctgatgtagctggagaggctatcaatggttggattccgcgcagggcggatgcatttgagaagctagctaagattgggcaaggtacttatagcaatgtctataaagctagagataatctaacggggaacatcgttgcactgaagaaggttagatttgataatttggagccagagagtgtgagatttatggcaagagagatcttgattttgcgccgcttggatcatccaaatgttattacgttgcaaggattggttacgtcaaggatgtcttgtagtttgtacctcgtgtttgattatatggatcatgatttagctggacttgctgcaagccctggaatcaagttcacagaggctcaggttaaatgttacatgcatcaactattagcagggctcgaacactgtcataaccgtcttgtgttgcatcgcgatataaaaggatcaaatcttcttattgacagtgggggagcactcaagattgctgattttgggttggcttctttctttgatcccaataaaaagcagcccatgactagtcgtgtggttactctatggtacagaccaccagagcttctacttggagccaccgactatggtgttggtgttgatctttggagtgctggttgtattttagctgagctattagctgggaaacccattatgcctggtcgtacagaggttgaacagctccacaagatcttcaagctatgcggatctccgtcagaagaatattggataaagtcaaggcttccacatgcaactatattcaagcctcagcaatcatacagaagatgtatagcagaaacttttaaagattttccgccttcatcgttgccattgattgagactcttctggccattgatcctgctgagcgtcagacagctacaactgcattacagagtgcattctttactaccaaaccttacgcctgtgaaccttccagccttcccaaatatccacccagcaaagaaatggatgcaaaacggcgagacgaagaatctcgaagacaaagagctactgggaaagctaatgctgatggtgtaaggagaaatcgtcaccgtgatcgagcagtgagggcaatccctgctcctgaagccaatgcggagctgcaagtcaatatcgataggcggcgtctagtaacacaagcaaacgcgaagagcaagagtgaaaagtttcctcccccacaccaggatggaacattaggttataccttgggttcttcacatcacattgatccagcctatgaaccctcagaagttccattcacatccattaatttctcatattcaaaagaaccgatccaaacgtggtccggcccattggtggaacctgcaactggtgctccaagaagaaagacaaagccatcaaagaaggattctaacaagaaaggaaaagaaagcctgtaaagtctataatgaacgacgtgattctacaatggtatacttcaaggagctgcaaaacttacagattatttgtcctatacgtaaatcaagaagcttctcaacagcatagagaggtaaacaagcatttttatcgtagtattctcctttgtattcttttggataatgagaatcttttcattattgtacatgtaaattttgtttcttcatattagcaggctctgtttagatcaataaaatcgtaacgctc

SEQ ID NO: 116 - DNA, 2021 bp, Unknown Organism
  polynucleotide sequence that is cell cycle modulated or involved in the cell cycle process
ccacgcgtccgccgttttccaacttccaatgcgcggcaaaccctaatcctcagctttggtttttgcctcagaaaattcatccgtcaatttgacctctattatggggcgcagtgactctagatcacctgccaggggtcgtggatctcctcgtaagaggagcccttcacgcagggaaaggtcacctgctcggaaaaagagttcacatgctgcaagttcagctgtagcagagaagccttcaaaccgtaataggtccccgagacgtgcaaggtcaagatctcttgttcctctttcacctgcaacagagaggccatctagtcgcaataggtccccaaagcgcagaaaatcaatctcccctgcatctcactccccagtcagagagaaaccctcgagtcgcacgaagtctcccaaacgagctaagtcaaggtctcctgattcgaggttgttacaggtagagaagtcttcaggccgagtcaggtctcctagacgtgccaagttgcagtctcctgaatctcgctcaccctcaccacgaacaaaaagactaaggagagcagaacaagagactgaagaaaagacaagggggcgcgagcctgagaaaaaccatgggagagctagtggtagggctgctctacatagggagaaggattctgatagaacagtgcctgaatcccgttcaccgtcaccacgaacaaaaagactaaggagagcagaacgagagactgaagaaaactcgagggagcgagagcctgagaaaaatcatgggagagctagtgatagggctacacatagggaaaaggattatgacagaacggtgcttgagtcccgttcaccgtcaccacgaactaaaagactaaggagagcagaaccagagactgaagaaaagttgaagatacgggagcccgagagaaatcatggaagagctagtgatagggctacacataaggaaaaagattctgacagaatggtgcaaaatgaaaggagagagaaaagatcaggaaaggatgcactggataatggatcttctaagtcaagaaatggtcgatcagcttcaccttcagaacgtcagcataggagtcggcacagatcgagatcacctgcagcagcggacacgagagcacgcgatgagatgacaagctcaaggagaggtgaactcaggaatggtgatgatgactccttatctaaaatgcaggcggcagaggaggccttgcaagctaaaaataaagacaagccttcgtttgagctctctggaaagcttgcagcagaaactaatcgagtaagaggtataacacttctctttaatgagccaccagatgctagaaaacccgacgtacgatggcgcttgtatgtttttaagggtggtgaagtccttaatgagcctctatatgttcatcgccaaagttgttatctttttgggagagaaaggagggttgcagacattcctacggatcacccatcttgcagcaagcaacatgctgtcctccagtacaggcaagttgagaaagacaatcccgatggtacttcatcgaagcaagtaaggccgtacgtaatggatcttggaagcactaatggtactttcattaatgaaaatcggattgagccccagagatactatgagctattagaaaaggatacacttaagtttggtaatagtagccgagagtatgtgctgcttcacgagaattcagcatgatgagtctctaaaatggttgacggaggtgtcatttgcattgattggctttgacgtcagaagctttatcagatcaaatatttgctgtgccatgttactagcaggatagccgttgtaagtgcttagccgaaatcgtgtaatgtggtagagatttgggcattgcttgcaaagtttttcactgctaatgaaaattttggtttatgcatcagtgatttatcctccagtttgtttataagctctttgtcccctatatatgggatatgttattgttgattaggtcttaacttgtgaatgtgcgctcttttcttctaattattgaagatgctggagtgccccc

SEQ ID NO: 117 - DNA, 1850 bp, Unknown Organism
  polynucleotide sequence that is cell cycle modulated or involved in the cell cycle process
attagatgcgtttggctttgactcaagcccttgaatcaaaactgcaatcaccgttgtggcaggttcgtgtgaaagcaatctgtgtcctcgaggctatcttgaggaaaaaagatgacgagcactttggtattatggcatcttatttcaatgaaaataaagatgttgtggtgaaatgctttgaatctccccaagcgtcattaagagaaaaggcaaacaaagtcttaagtcttctgaatgatggacaaacagctgattctgtgcctcatgtagataggtcagcaatggctggtgcccctgttgttcagatgcccgacttgatagacacaggtaattccgatgatctgtttggagcagatgatttagcaaatatgcagagtggtgaagggataaaaattgcatccacctctggcgcccctctggttgatgatctatttggagacaatttgggtggcggcgtggcttccggccagcagaaaaatggtgatgacccctttgctgatgtctcatttcacaccagtaatgagaaggcgcttgaagctgatcacttttctggaatgacatttgataaaacagatgctactgaagtccatttggctgtcgatagaactggacctgaactgtttgacatgtttggtcccagtgttgaagttccccaggatcccaataatcctagaaaggagattcacgatttaatgaatagtctctctttgaatgggaatgactcatctaagaagcagaatggcagctcaaggggaacctatccggatatgtttcaagagtccactattgatcctcatcaggcttcgaatgatgccttgaacagcatattttcctcccaggctggtggagcaaattcaaatcccatgtttcctttgggtgctatgcagtataacttgcctcctggcttcgtattgaatccatcatttgctcctcaggctctaaactataatgccatgggtaacatgtttgctcaacagcagttctttgcaacactttccagttaccagcaattagctaccatgcacccatccactagtgctagtcatgccgctgattctgctggaggttatggttcagctcttcccgatatcttcaatcctagcatttctaatcatagtcctacttccttgatgaatacttcaaagaaagaagatacaaaagcatttgattttatctcggtaagtttggtccttgtgtacttcaatttttctattattactttgaagatgcattgaattgtgacggccctagtgtgtccctgattttgaaggtatgccattaacaattatgccttttgtttatctattttatttggcctaaatccctccttcctccactccaaaaagatgaggtcctccgcctttattcttgtggtgataaatgaggtccattgcattgtccttttccaggcccccagtcatgtaaagaataagtggacttggaaatactctggcatcataatcagctattccttttctgttaatgtacttagatatctcattgtagggcttctcagtgcttcatctttttttgtcaatgttgtgagcaataaagtttctcagttctgattgtgtgcaatatcatcttttccaaactgagaagactagaaaacttcatttaggactgtatgactctaattttgttgccatggtggattccctgtgttttttgcaggatcatttggctgcagctcgtgatccaaagagggtgatttgagtggttatagctcaaagcaacccagagtatgctgcttataagatttagctatgcacaatttgaagcaggagtaatctgtaaaggttcttttgaagcagtgatatcaatgtgaaatacagtattatttttttttt

SEQ ID NO: 118 - DNA, 1411 bp, Unknown Organism
  polynucleotide sequence that is cell cycle modulated or involved in the cell cycle process
ccacgcgtccgaacgattctccctcgtaacttcattttcagtcatggcttctgctactaagaaggtattggttccgattgcgaacggaaccgagccgattgaggctatagtgcccatagatattttgcggagagctggtgcggaggttactgttgcctcagttgagaagcagcttcagattgaaggagtgcacggaattaagatcgttgctgatgctctaatttctgattgtgcggatactgaattcgaccttatctcacttccgggagggattcctggtgcaaccaacctaaggaattgcaagactttggaaagcatagtaaaaaagcaagctgaaaatggacggttttatgctgcaatatgcgctgctcctgctgtagcacttggatcatgggggcttctgaaggggctgaaagcaacatgttatccgtcgtatatggaggaactatcatcttataccattgctgttgagtcaagagtccaaaaggatggaacagttgtgacaagtcgaggaccaggaactgcgatcgagtatgctgttgcattggttgaggagttgtatggaaaagagaaggctgatgaagtttctggcccactcgtgatgcgcccaaatcacatcgaagaatttgcatttgctgagctcaattcagtaaattggacatttacgagtaagccacagattcttgtacctattgcgaatggttctgaggaaattgaagcagctactattatcgatgtacttcgacgagcaaatgctcaagtagtagtggcatctttggaagatacattggagattgtcgcttccagaaaagttaagctagtagcagatgtgctccttgatgaagctgctaagcagtcatatgatcttatcgtcctgccgggtggtcttggcggtgcccaagcatttgccaactcagaaaagttggttgacatgctgaagaagcagagagaatcaagcaaaccgtatggagcaatgtgtgcatctccggctctagtcctagagcaccatgggttgctcaagggtaaaaaggctactgcctttccagctatgtgcaataagctctcagatccaagcgaagcagaaaatagggtgttggttgatggcaatcttgttactagcagaggaccaggaactaccatggagtttgcactggccattgcagataagtttattggccgcaaggaagtactagtgctagcaaagaagatggttttctaagtagaatcattttgcctgtcttccgtctttaggattatataggcacccatagttacccatagttgtaaacttgtaataaactttggccatcagtgtgcacttaaaataaaagaaatgctgtatacgagttacactcagtcgcatttgctaatttcctattcaatgccatcgctttttaaaaaaaaaaaaaaa

SEQ ID NO: 119 - DNA, 284 bp, Unknown Organism
  polynucleotide sequence that shows homology with sequences of unknown function
  misc_feature (2)..(2): n is a, c, g, or t
  misc_feature (6)..(6): n is a, c, g, or t
  misc_feature (13)..(13): n is a, c, g, or t
  misc_feature (16)..(16): n is a, c, g, or t
  misc_feature (19)..(19): n is a, c, g, or t
  misc_feature (30)..(30): n is a, c, g, or t
  misc_feature (36)..(36): n is a, c, g, or t
  misc_feature (39)..(40): n is a, c, g, or t
  misc_feature (49)..(49): n is a, c, g, or t
  misc_feature (58)..(60): n is a, c, g, or t
  misc_feature (63)..(63): n is a, c, g, or t
  misc_feature (65)..(65): n is a, c, g, or t
  misc_feature (69)..(69): n is a, c, g, or t
  misc_feature (72)..(72): n is a, c, g, or t
  misc_feature (77)..(77): n is a, c, g, or t
  misc_feature (91)..(92): n is a, c, g, or t
  misc_feature (97)..(97): n is a, c, g, or t
  misc_feature (102)..(102): n is a, c, g, or t
  misc_feature (109)..(109): n is a, c, g, or t
  misc_feature (118)..(118): n is a, c, g, or t
  misc_feature (127)..(127): n is a, c, g, or t
  misc_feature (134)..(134): n is a, c, g, or t
  misc_feature (138)..(138): n is a, c, g, or t
  misc_feature (160)..(160): n is a, c, g, or t
  misc_feature (186)..(186): n is a, c, g, or t
  misc_feature (208)..(208): n is a, c, g, or t
  misc_feature (211)..(211): n is a, c, g, or t
  misc_feature (215)..(215): n is a, c, g, or t
  misc_feature (272)..(272): n is a, c, g, or t
gnatgnctgaccnagntgngtgcttaagtntcgcangcnnctgtagtgnaggggaccnnncantntctnctngacgnccgcagtaaccagnnctctnaaccnatgcatnatgcagatncaggctttncagtctnttanggctcaattggtgtatgcaagntccaggacatggtgtacgatcagatnatgatctgcaagcgaagaattntgntttntcaaatgctctttcaagccctgttcgacgaagcctgcagaactatcaaattgctcanggaggtttcctt

SEQ ID NO: 120 - DNA, 202 bp, Unknown Organism
  polynucleotide sequence that shows homology with sequences of unknown function
  misc_feature (29)..(29): n is a, c, g, or t
  misc_feature (39)..(39): n is a, c, g, or t
  misc_feature (41)..(41): n is a, c, g, or t
  misc_feature (48)..(48): n is a, c, g, or t
  misc_feature (58)..(58): n is a, c, g, or t
  misc_feature (70)..(70): n is a, c, g, or t
  misc_feature (79)..(80): n is a, c, g, or t
  misc_feature (87)..(87): n is a, c, g, or t
  misc_feature (90)..(90): n is a, c, g, or t
  misc_feature (93)..(93): n is a, c, g, or t
  misc_feature (97)..(97): n is a, c, g, or t
  misc_feature (99)..(99): n is a, c, g, or t
  misc_feature (108)..(109): n is a, c, g, or t
  misc_feature (114)..(114): n is a, c, g, or t
  misc_feature (125)..(125): n is a, c, g, or t
  misc_feature (133)..(133): n is a, c, g, or t
  misc_feature (175)..(176): n is a, c, g, or t
  misc_feature (182)..(182): n is a, c, g, or t
  misc_feature (186)..(186): n is a, c, g, or t
  misc_feature (189)..(189): n is a, c, g, or t
  misc_feature (191)..(191): n is a, c, g, or t
actcgcggacggagaacaaccgagagaangggagacatngntccaaantcgtggactnccaatgtactgntgagcactnngtaactnatnatntggntnatgagggcnnggcangaataggcagnacgcgggngcaaaccctgcgaattgatacgatcagataaaagatcatcannatgganaggngcngntgttctggggt

SEQ ID NO: 121 - DNA, 222 bp, Unknown Organism
  polynucleotide sequence that shows homology with sequences of unknown function
  misc_feature (2)..(2): n is a, c, g, or t
  misc_feature (16)..(17): n is a, c, g, or t
  misc_feature (23)..(23): n is a, c, g, or t
  misc_feature (28)..(28): n is a, c, g, or t
  misc_feature (33)..(33): n is a, c, g, or t
  misc_feature (81)..(81): n is a, c, g, or t
  misc_feature (179)..(179): n is a, c, g, or t
tntggctaagaactgnnctatanctagngacantgtgctattcgactcacaggaaaaactactaaaggattctctagattngcataatttccaagagataaaaaagtttttccatgctcacttcaaggtggatcgagaacttcaggcatctgttgctgtgtatgcattgaaaggccagngattctgttcttgatgagcaaaatagaatctacaagttggtgt

SEQ ID NO: 122 - DNA, 99 bp, Unknown Organism
  polynucleotide sequence that shows homology with sequences of unknown function
  misc_feature (3)..(3): n is a, c, g, or t
  misc_feature (8)..(8): n is a, c, g, or t
  misc_feature (14)..(14): n is a, c, g, or t
  misc_feature (17)..(17): n is a, c, g, or t
  misc_feature (24)..(24): n is a, c, g, or t
  misc_feature (55)..(55): n is a, c, g, or t
  misc_feature (57)..(57): n is a, c, g, or t
  misc_feature (59)..(59): n is a, c, g, or t
  misc_feature (70)..(71): n is a, c, g, or t
  misc_feature (78)..(78): n is a, c, g, or t
  misc_feature (80)..(80): n is a, c, g, or t
  misc_feature (87)..(87): n is a, c, g, or t
  misc_feature (91)..(91): n is a, c, g, or t
  misc_feature (98)..(98): n is a, c, g, or t
ggngaggngacggngantggagcngtagtgtcgcgggaggagggacaaaagctgnangnaagaacagcgnnacaagantnacacctnctgnaatatant

SEQ ID NO: 123 - DNA, 110 bp, Unknown Organism
  polynucleotide sequence that shows homology with sequences of unknown function
  misc_feature (64)..(64): n is a, c, g, or t
  misc_feature (67)..(67): n is a, c, g, or t
  misc_feature (100)..(100): n is a, c, g, or t
  misc_feature (102)..(104): n is a, c, g, or t
aatagcagcggcagcatacgactacgagaacgatccgagatgggcagattactggtccaacatnctnattcctcctcacatggcttgccgttccgacgtngnnnaccact

SEQ ID NO: 124 - DNA, 128 bp, Unknown Organism
  polynucleotide sequence that shows homology with sequences of unknown function
  misc_feature (3)..(3): n is a, c, g, or t
  misc_feature (6)..(6): n is a, c, g, or t
  misc_feature (12)..(12): n is a, c, g, or t
  misc_feature (39)..(39): n is a, c, g, or t
  misc_feature (54)..(54): n is a, c, g, or t
  misc_feature (69)..(69): n is a, c, g, or t
  misc_feature (75)..(75): n is a, c, g, or t
  misc_feature (77)..(77): n is a, c, g, or t
  misc_feature (125)..(125): n is a, c, g, or t
ttnagnatccgnaagttgagcaacaacttcagcactcgngcagagaatggaaantcgatgacattgtgnacgctngnggcagtgggggtacggacgctggattgtccattgcatccaggctcagnggc

SEQ ID NO: 125 - DNA, 155 bp, Unknown Organism
  polynucleotide sequence that shows homology with sequences of unknown function
  misc_feature (60)..(60): n is a, c, g, or t
  misc_feature (65)..(65): n is a, c, g, or t
  misc_feature (104)..(104): n is a, c, g, or t
actccttacaaccagcagattgcaaattgctgcaagggaggagtgatcaactcatggggncaagnatactgcaacatgctgttagctcattccaagtcagtgtnggtgctgccggaacaaccaataaaacagttagagttcctaagaacttcacc

SEQ ID NO: 126 - DNA, 166 bp, Unknown Organism
  polynucleotide sequence that shows homology with sequences of unknown function
  misc_feature (63)..(63): n is a, c, g, or t
gccagtcattcgttgtcccataagcccaacagccacccaaaaccatccaaatctgagctgttntccagcgctaagctagtggccgacgcggccaaagcaaaactccatcacgagccaaacagtaaggtcgacaagtctgagctcgccggagccgccgctgacctcc

SEQ ID NO: 127 - DNA, 235 bp, Unknown Organism
  polynucleotide sequence that shows homology with sequences of unknown function
  misc_feature (5)..(5): n is a, c, g, or t
  misc_feature (67)..(67): n is a, c, g, or t
  misc_feature (116)..(116): n is a, c, g, or t
agagncaaatcccacatggggcatctggcttgggcggatgcttttgtcatcacagcagattcatgtntagacatgttgagtgaggcttgcagtactgggaagcctgtgtatgtagntggagctgaacgctgtacgtggaagctcacagatttccacaagacactcagagagaggggactgactaggccattcacaggacttgaggatatgtcagaaagttggagttaccctccgc

SEQ ID NO: 128 - DNA, 121 bp, Unknown Organism
  polynucleotide sequence that shows homology with sequences of unknown function
  misc_feature (14)..(14): n is a, c, g, or t
caacaagaggaaantggagttcaattgacttgggaactgaaatttatagagacgctaatcaagtggctgagtggactgtctctgattttgacattcttgtacccaataacaattagaagta

SEQ ID NO: 129 - DNA, 237 bp, Unknown Organism
  polynucleotide sequence that shows homology with sequences of unknown function
cttttgctagaatcttgcaagctggacaaggtgaaatggtcgggagtgaaaacacagcattcaacaaccccgttcgttgatgaaatgtacgagcgcctgaaagaaactctaactgactatgaggtcatcatctgccgttggccggagtacacatttgcattggagaatgccattgctgatattgagaaagcaattttggatgcactagagaagcaatatgcagatgtcttgtcacca

SEQ ID NO: 130 - DNA, 169 bp, Unknown Organism
  polynucleotide sequence that shows homology with sequences of unknown function
cagaaaaggaggaaaaaatgagaaaatatcttctgcttagagtgttgtcaaagcttttgccctcactgccttccttctcatcatttttgtcctcttctcttggtctctctctgtataattatgtagtagataaaacttcaagtattcatttgaggtttttgtttcctaa

SEQ ID NO: 131 - DNA, 66 bp, Unknown Organism
  polynucleotide sequence that shows homology with sequences of unknown function
  misc_feature (5)..(5): n is a, c, g, or t
  misc_feature (17)..(18): n is a, c, g, or t
  misc_feature (49)..(50): n is a, c, g, or t
  misc_feature (58)..(58): n is a, c, g, or t
  misc_feature (64)..(64): n is a, c, g, or t
  misc_feature (66)..(66): n is a, c, g, or t
ctctncctcacacgaannagtacttgacaagggagttagtactttatanngacgacantttagncn

SEQ ID NO: 132 - DNA, 106 bp, Unknown Organism
  polynucleotide sequence that shows homology with sequences of unknown function
  misc_feature (1)..(1): n is a, c, g, or t
  misc_feature (3)..(3): n is a, c, g, or t
  misc_feature (11)..(11): n is a, c, g, or t
  misc_feature (13)..(13): n is a, c, g, or t
  misc_feature (19)..(19): n is a, c, g, or t
  misc_feature (97)..(97): n is a, c, g, or t
ntnccatgttnanaaaatncaagctctgaatggaaacggcttgggtgctgatacttcttcctttggtttcttgggacagattcctcgaaacttcagnttgtcggac

SEQ ID NO: 133 - DNA, 189 bp, Unknown Organism
  polynucleotide sequence that shows homology with sequences of unknown function
  misc_feature (5)..(5): n is a, c, g, or t
gtagnattctccatttgaaaatacatagtgtcaggccatctgggacatcaaacggaggtggagagactagtctaagggcaaggagaccaccaagccaagatcaggatgctgcattagcattgcgattgcagtataggaattctcttgctctggccagatcgaatttgagggccatggcatcaagagcca

SEQ ID NO: 134 - DNA, 246 bp, Unknown Organism
  polynucleotide sequence that shows homology with sequences of unknown function
  misc_feature (1)..(4): n is a, c, g, or t
  misc_feature (6)..(6): n is a, c, g, or t
  misc_feature (9)..(9): n is a, c, g, or t
  misc_feature (11)..(11): n is a, c, g, or t
  misc_feature (16)..(16): n is a, c, g, or t
  misc_feature (31)..(31): n is a, c, g, or t
  misc_feature (34)..(34): n is a, c, g, or t
  misc_feature (73)..(73): n is a, c, g, or t
  misc_feature (97)..(97): n is a, c, g, or t
  misc_feature (147)..(147): n is a, c, g, or t
nnnngnatntntctgntataatcttgcaagntgnacaaggtgaaatggtcgggagtgaaaacacagcattcancaaccccgttcgttgatgaaatgnacgagcgcctgaaagaaactctaactgactatgaggtcatcatctgccgntggccggagtacacatttgcattggagaatgccattgctgatattgagaaagcaattttggatgcactagagaagcaatatgcagatgtcttgtcacca

SEQ ID NO: 135 - DNA, 202 bp, Unknown Organism
  polynucleotide sequence that shows homology with sequences of unknown function
  misc_feature (53)..(53): n is a, c, g, or t
  misc_feature (65)..(65): n is a, c, g, or t
  misc_feature (99)..(99): n is a, c, g, or t
  misc_feature (158)..(158): n is a, c, g, or t
  misc_feature (176)..(177): n is a, c, g, or t
  misc_feature (182)..(182): n is a, c, g, or t
tctgggtatcatttgggctgttcggtacaagacggatacggagagtcacttangagaaactgttnggaagagagagaaagaggcgggaaactattggcnaggtgtgtggaggaattgaagagaaaaggggtggagtttgatttgttgaaagaggttgncgctcttaggagggctannagttngagggttgaaactaaggttg

SEQ ID NO: 136 - DNA, 140 bp, Unknown Organism
  polynucleotide sequence that shows homology with sequences of unknown function
gcacgtttggctcgtctgctctcccgcaagaaagtgcgagtgatatggatatcagtagttcagtacttttgttagggtcagcttgttggggaatccggttcttttgttattaggtggtaaaagaaacttttatgtcgctg

SEQ ID NO: 137 - DNA, 222 bp, Unknown Organism
  polynucleotide sequence that shows homology with sequences of unknown function
  misc_feature (4)..(4): n is a, c, g, or t
  misc_feature (6)..(6): n is a, c, g, or t
  misc_feature (92)..(92): n is a, c, g, or t
ttangngccaatgtttcaatacacattgcccccgccatgaatatcggaacaatgacacaattatttgatgtagcacaagaagagtgttcagnccttttcttgtggacttatttggttgcagcatttgcacttactatttggtccactgtattcatgtggctcttgtcctgattgtcacaagaagacacaatatgaagatattatataatggtgtggtgtgct

SEQ ID NO: 138 - DNA, 62 bp, Unknown Organism
  polynucleotide sequence that shows homology with sequences of unknown function
  misc_feature (11)..(11): n is a, c, g, or t
tgaactgaatntggtatctgtattactcctgttgtaatggcattggacttatacggccttgg

SEQ ID NO: 139 - DNA, 117 bp, Unknown Organism
  polynucleotide sequence that shows homology with sequences of unknown function
tgtttgtcttccggctttgagggctttccagatggtacatatgaaggagttgaaactggatatgacgaattatttaggacgccatcatccctcacggagagcccagacattctctgg

SEQ ID NO: 140 - DNA, 219 bp, Unknown Organism
  polynucleotide sequence that shows homology with sequences of unknown function
  misc_feature (6)..(7): n is a, c, g, or t
  misc_feature (11)..(11): n is a, c, g, or t
  misc_feature (14)..(15): n is a, c, g, or t
  misc_feature (18)..(18): n is a, c, g, or t
  misc_feature (29)..(29): n is a, c, g, or t
  misc_feature (31)..(32): n is a, c, g, or t
  misc_feature (40)..(40): n is a, c, g, or t
  misc_feature (81)..(81): n is a, c, g, or t
  misc_feature (132)..(132): n is a, c, g, or t
  misc_feature (157)..(157): n is a, c, g, or t
  misc_feature (177)..(177): n is a, c, g, or t
  misc_feature (183)..(183): n is a, c, g, or t
  misc_feature (195)..(195): n is a, c, g, or t
  misc_feature (214)..(214): n is a, c, g, or t
ttgaanncccnttnngangcaccacaagntnnaatccttnctgtaaatggtagcaaaatcctacccgattggggatacggnagagtttatactgatttagttatcaattgcactttccctattccagttggnactgaaaatggaggaaaactcgtanttcatgccgctactaacggnggcggngacactaaattnaacaccgccgacacttttntaggg

SEQ ID NO: 141 - DNA, 224 bp, Unknown Organism
  polynucleotide sequence that shows homology with sequences of unknown function
  misc_feature (3)..(3): n is a, c, g, or t
  misc_feature (14)..(14): n is a, c, g, or t
  misc_feature (39)..(39): n is a, c, g, or t
canaataccccttnaaacgacccgagtctcaaaatcgangagattggaacactttcggtcagtacttgaggaatcaaaggccaccagtttccatatcccaatgttatagcaaccatgtcctagagttcctccgatacctggaccagttcgggaaaactaaggttcacttacaaggttgtatcttttatggacagcccgagccgccagctccctgtacttgtccg

SEQ ID NO: 142 - DNA, 95 bp, Unknown Organism
  polynucleotide sequence that shows homology with sequences of unknown function
  misc_feature (3)..(3): n is a, c, g, or t
  misc_feature (8)..(8): n is a, c, g, or t
  misc_feature (10)..(10): n is a, c, g, or t
  misc_feature (35)..(36): n is a, c, g, or t
  misc_feature (38)..(38): n is a, c, g, or t
  misc_feature (41)..(41): n is a, c, g, or t
  misc_feature (67)..(67): n is a, c, g, or t
  misc_feature (78)..(78): n is a, c, g, or t
  misc_feature (80)..(80): n is a, c, g, or t
ctngtggnantaaataacattctcatttctttccnntnttnttcaggtccagtaccaccaatggagnctttccctatnantaattcatatagtcg

SEQ ID NO: 143 - DNA, 178 bp, Unknown Organism
  polynucleotide sequence that shows homology with sequences of unknown function
  misc_feature (2)..(2): n is a, c, g, or t
  misc_feature (10)..(10): n is a, c, g, or t
  misc_feature (12)..(12): n is a, c, g, or t
  misc_feature (26)..(26): n is a, c, g, or t
gngatgtctncntattgcacatctgntgttgattcactttatgggaatgctcagaaatttcaagcaatcgagacagataatcgcaggcaacgagcagctctagtgaccttacaggaaaaggtagatgctgttgcttacccaagaggaactctgggtgaaaaatacgtgcatacttccg

SEQ ID NO: 144 - DNA, 153 bp, Unknown Organism
  polynucleotide sequence that shows homology with sequences of unknown function
gaatggaaaaagtgaaagtgaattgcttgacggatgccgagtgctactatacatggctacttgtaaccaccctgctagtatttgatgaactgctgaagtctataaggccgtatggcactcttagtttgttgtccgcgctgatgtgtgaagtca

SEQ ID NO: 145 - DNA, 211 bp, Unknown Organism
  polynucleotide sequence that shows homology with sequences of unknown function
  misc_feature (185)..(185): n is a, c, g, or t
gttcctttgccatttcagctgccggcggcagtatcttcacctgggacgacgtctttcaactccccgaatctcctcaaaatgactcttctaccctctcagctttcttcgataaaatcaagctctgtaatcgcaattcggagaagcaatccgagttcatgcctttcgtgattgaagaccaaataatnggatacgtacaccacgtggttgctga

SEQ ID NO: 146 - DNA, 225 bp, Unknown Organism
  polynucleotide sequence that shows homology with sequences of unknown function
  misc_feature (4)..(4): n is a, c, g, or t
  misc_feature (13)..(13): n is a, c, g, or t
  misc_feature (27)..(27): n is a, c, g, or t
  misc_feature (32)..(32): n is a, c, g, or t
  misc_feature (63)..(63): n is a, c, g, or t
  misc_feature (70)..(70): n is a, c, g, or t
  misc_feature (77)..(77): n is a, c, g, or t
  misc_feature (100)..(100): n is a, c, g, or t
  misc_feature (111)..(112): n is a, c, g, or t
  misc_feature (115)..(115): n is a, c, g, or t
  misc_feature (121)..(121): n is a, c, g, or t
  misc_feature (140)..(140): n is a, c, g, or t
  misc_feature (160)..(161): n is a, c, g, or t
  misc_feature (218)..(218): n is a, c, g, or t
agantttaactcnatccattactgtanatggnatgcaaaatcctacccgattggggatacggnagagttnatactgntttatgctatcaattgcactttncctattccagnnggnactganaatggaggaaaactcgtanttcatgccgctactaacggnngcggagacactaaattcaacaccgccgacactttcgtagggttactcaggactcatnaagaagg

SEQ ID NO: 147 - DNA, 282 bp, Unknown Organism
  polynucleotide sequence that shows homology with sequences of unknown function
  misc_feature (4)..(4): n is a, c, g, or t
  misc_feature (20)..(20): n is a, c, g, or t
  misc_feature (28)..(28): n is a, c, g, or t
  misc_feature (143)..(143): n is a, c, g, or t
  misc_feature (145)..(145): n is a, c, g, or t
tttncacactaattcccctntatctacnaatgaagtgcgtgggcttgcagtacctggaggccattcgtaagctcaaggcttctggcttccaaccaacgcgcactgtctacctttccttcgtccccgacgaggaaatcggcggngncgatggagccggaaagtttgtcgattccgatgtcttcgtgaagatgaatgttgggattgtacttgacgagggcttgccttctcccaccgaaaactatcgtgcattctatggggagaggtccccctggtggctggtcg

SEQ ID NO: 148 - DNA, 324 bp, Unknown Organism
  polynucleotide sequence that shows homology with sequences of unknown function
  misc_feature (2)..(2): n is a, c, g, or t
  misc_feature (19)..(20): n is a, c, g, or t
  misc_feature (22)..(22): n is a, c, g, or t
  misc_feature (24)..(24): n is a, c, g, or t
  misc_feature (33)..(33): n is a, c, g, or t
  misc_feature (38)..(38): n is a, c, g, or t
  misc_feature (52)..(52): n is a, c, g, or t
  misc_feature (56)..(56): n is a, c, g, or t
  misc_feature (64)..(64): n is a, c, g, or t
  misc_feature (67)..(67): n is a, c, g, or t
  misc_feature (70)..(71): n is a, c, g, or t
  misc_feature (88)..(88): n is a, c, g, or t
  misc_feature (117)..(117): n is a, c, g, or t
  misc_feature (132)..(132): n is a, c, g, or t
  misc_feature (302)..(302): n is a, c, g, or t
gntccgtaaagtccccagnntncncgacccgtnactcnggagttacagcganacangtggctgnatnatnngacatactcagacctanttagctttgatataatccgtgagggtaanttcgttctttgcaancaaatggacgaacctggtatgtttagcctaattgcaaacaggtttgctgatgcttttatttcatgggtttcaatttgtactaaagctcacttgccgttcttcatgtactagaaaactacatatgtctatgaccctttacctagtctggtaatttcaaggcatgagattgngattgatcaaaacaagttggag

SEQ ID NO: 149 - DNA, 338 bp, Unknown Organism
  polynucleotide sequence that shows homology with sequences of unknown function
  misc_feature (111)..(111): n is a, c, g, or t
  misc_feature (310)..(310): n is a, c, g, or t
  misc_feature (334)..(334): n is a, c, g, or t
ggtaactccgatatcatcgagagccgatacgcactcacaaagcggcaaggtgctcgctatgtgcctgctgctttcttgactggtttgcttgacccggtaaagtccagggangaatttgtccaactatttgctgagttagagggtaggataccagttctagttctggcaacagcaggttctccgaagaggtcaaaagcagagatggaagcacttatggaggccaaaggggtgagcaagtatatcgaagtgccaggtgctctccttccccaggaagagtatcctgaaatagttgcagaacagctttacaggnttctgcaagagaagtttgagcttnaggc

SEQ ID NO: 150 - DNA, 237 bp, Unknown Organism
  polynucleotide sequence that shows homology with sequences of unknown function
  misc_feature (5)..(6): n is a, c, g, or t
  misc_feature (25)..(25): n is a, c, g, or t
  misc_feature (29)..(30): n is a, c, g, or t
  misc_feature (35)..(35): n is a, c, g, or t
  misc_feature (48)..(48): n is a, c, g, or t
  misc_feature (72)..(72): n is a, c, g, or t
ttttnncacttctaaaaccctcgtntgannctgcnaggcatgtgaagntgtcaaactcaaaccttatgccanaaagtgcaagaaactgatctttgaatatgcgccagtgattctcgtaaatgctgaacagtttctggaaaaaaatgacgtatgtgctattcttcatgattgagagcctgcagcagataaagagctacaagcatcaccaaagatgcaagcttcattgcattcggcctc

SEQ ID NO: 151 - DNA, 231 bp, Unknown Organism
  polynucleotide sequence that shows homology with sequences of unknown function
  misc_feature (4)..(4): n is a, c, g, or t
  misc_feature (90)..(90): n is a, c, g, or t
  misc_feature (99)..(99): n is a, c, g, or t
  misc_feature (153)..(153): n is a, c, g, or t
  misc_feature (186)..(186): n is a, c, g, or t
ctgnccctatccgatccaatagttgactcaaaggtgttgcctattccagccggagatttgagttttggttcgggtgcacaactgaaaaantcagttggnaattggtcaagatgtcttactgatttgtttggcatagatgctgaagattccggncaaaatgatgaaggcagcttcggagatgatcanaggaaaggtggaaatcaaccagagcatttccatcttctcaatgcc

SEQ ID NO: 152 - DNA, 78 bp, Unknown Organism
  polynucleotide sequence that shows homology with sequences of unknown function
aatcctgttcaataccaaaatcaagcaacaaacggttggcaagcttcttggaaaaagtttttgatagatatgatgtac

SEQ ID NO: 153 - DNA, 234 bp, Unknown Organism
  polynucleotide sequence that shows homology with sequences of unknown function
tcaactgagaggtgtgggaagaaatgaagaattgttgatggcttattttgcagaaagccttatgggagtagctccgaatggtttatggatcaagacacgtctcgctggtatgtctgggatgacatggcacaggcctttgtcaaacggttccaatacaacatcgacattgcccagaccacatttccctttcaaacctgaagaagaaaccaagtgaaagtttcagggaatatgcca

SEQ ID NO: 154 - DNA, 119 bp, Unknown Organism
  polynucleotide sequence that shows homology with sequences of unknown function
  misc_feature (22)..(22): n is a, c, g, or t
  misc_feature (29)..(29): n is a, c, g, or t
  misc_feature (73)..(73): n is a, c, g, or t
ctgggtgaaaaagctctccttntgccttnccagaagcacctagcgcaacatgtaatggatagatgtgctcggnccatggatgtgcaacttttgcatgcggagccttcatgtcatagtta

SEQ ID NO: 155 - DNA, 52 bp, Unknown Organism
  polynucleotide sequence that shows homology with sequences of unknown function
  misc_feature (11)..(11): n is a, c, g, or t
cgctgctgtgngttgaattttctcccattttttggagaggtgtgtatctgga

SEQ ID NO: 156 - DNA, 158 bp, Unknown Organism
  polynucleotide sequence that shows homology with sequences of unknown function
  misc_feature (110)..(110): n is a, c, g, or t
  misc_feature (141)..(141): n is a, c, g, or t
  misc_feature (157)..(157): n is a, c, g, or t
aatggagaatggaaaaagtgaaagtgaattgcttgacggatgccgagtgctactatacatggctactgtaaccaccctgctagtatttgatgaactgctgaagtctatanggccgtatggcactcttagtttgttgtccgngctgatgtgtgaagtna

SEQ ID NO: 157 - DNA, 150 bp, Unknown Organism
  polynucleotide sequence that shows homology with sequences of unknown function
  misc_feature (2)..(2): n is a, c, g, or t
  misc_feature (21)..(21): n is a, c, g, or t
gntatgttgctgatcaatctngttatggcatggttgatccttctcagcattattatccggagcaaccatccaagccgcagccaagcatttcgaacagtccttatgctgagaattatcaacagccatttggttcttcatacagtagcggct

SEQ ID NO: 158 - DNA, 95 bp, Unknown Organism
  polynucleotide sequence that shows homology with sequences of unknown function
tacccaaaaataaaagtaccatcctgatgcatcctaatgtgctacatattgcaatcttcatgggtaaaagaggtcatttggcggaccaatgaggt

SEQ ID NO: 159 - DNA, 230 bp, Unknown Organism
  polynucleotide sequence that shows homology with sequences of unknown function
  misc_feature (11)..(11): n is a, c, g, or t
  misc_feature (184)..(184): n is a, c, g, or t
  misc_feature (213)..(213): n is a, c, g, or t
  misc_feature (220)..(220): n is a, c, g, or t
acggggcctcnaggctaataaacaaacagaaaatgaaaattcttttgagaaagagttgctaaaaatgcaagaaaaacttcaaaagatgacacttgagaaggagcagactgaggaaatgttgaaagctagagaggatatgttgaagcagaaggaggaagagctcgaagctcgggataaagagcangaaaagcttcaaattgaactcaaaaagtngcagaanatgaaagagt

SEQ ID NO: 160 - DNA, 342 bp, Unknown Organism
  polynucleotide sequence that shows homology with sequences of unknown function
  misc_feature (5)..(6): n is a, c, g, or t
  misc_feature (9)..(9): n is a, c, g, or t
  misc_feature (17)..(18): n is a, c, g, or t
  misc_feature (20)..(20): n is a, c, g, or t
  misc_feature (25)..(25): n is a, c, g, or t
  misc_feature (66)..(66): n is a, c, g, or t
  misc_feature (133)..(133): n is a, c, g, or t
  misc_feature (205)..(205): n is a, c, g, or t
  misc_feature (331)..(331): n is a, c, g, or t
  misc_feature (338)..(338): n is a, c, g, or t
ttttnngangtactaanncncattntagccgaccgcactcacaaagcggcaaggcgctcgctatgngcctgctgctttcttgactggtttgcttgacccggtaaagtccagggaagaatttgtccaactattngctgagttagagggtaggataccagttctagttctggcaacagcaggttctccgaagaggtcaaaagcaganatggaagcacttatggaggccaaaggggtgagcaagtatatcgaagtgccaggtgctctccttccccaggaagagtatcctgaaatagttgcagaacagctttacaggtttctgcaagagaagttngagcttnaggc

SEQ ID NO: 161 - DNA, 75 bp, Unknown Organism
  polynucleotide sequence that shows homology with sequences of unknown function
  misc_feature (6)..(6): n is a, c, g, or t
  misc_feature (10)..(10): n is a, c, g, or t
  misc_feature (14)..(14): n is a, c, g, or t
  misc_feature (34)..(34): n is a, c, g, or t
  misc_feature (74)..(74): n is a, c, g, or t
taatcncacnaatngaggccctatgcaaatctcnttcaagtggagtttgcttcatacttgcattattgtcactnt

SEQ ID NO: 162 - DNA, 79 bp, Unknown Organism
  polynucleotide sequence that shows homology with sequences of unknown function
  misc_feature (42)..(42): n is a, c, g, or t
ttattgggtaattcccatctactgggtctttctcaagatttntcaactgcatctgtagccagtgataacaagcaggatg

SEQ ID NO: 163 - DNA, 116 bp, Unknown Organism
  polynucleotide sequence that shows homology with sequences of unknown function
  misc_feature (11)..(11): n is a, c, g, or t
  misc_feature (27)..(28): n is a, c, g, or t
  misc_feature (79)..(79): n is a, c, g, or t
  misc_feature (109)..(109): n is a, c, g, or t
aagtaaactcncggtagggaaactacnncgatgaaggtcttcagtcagctgaactacttggatgtgctcatatccgttngaatgagcttgagcctggtaaagtaaaggntatttgg

SEQ ID NO: 164 - DNA, 137 bp, Unknown Organism
  polynucleotide sequence that shows homology with sequences of unknown function
  misc_feature (2)..(2): n is a, c, g, or t
  misc_feature (8)..(8): n is a, c, g, or t
  misc_feature (28)..(28): n is a, c, g, or t
  misc_feature (34)..(34): n is a, c, g, or t
  misc_feature (37)..(37): n is a, c, g, or t
  misc_feature (115)..(115): n is a, c, g, or t
  misc_feature (126)..(126): n is a, c, g, or t
gncgcganttccttcgtccaagactgangctttntanttcaaacaggtagttcaaatgcttactgggtcctctgaaaccgccaaggttgcagctactccgggtcgggctgagccngttagacatcntatcccgccca

SEQ ID NO: 165 - DNA, 189 bp, Unknown Organism
  polynucleotide sequence that shows homology with sequences of unknown function
  misc_feature (9)..(9): n is a, c, g, or t
  misc_feature (42)..(42): n is a, c, g, or t
  misc_feature (119)..(119): n is a, c, g, or t
tgctgtgantcttttgctacatatgcctacgatttacgaatntgcaaataatgttggattttccaggcatcttcagaattgcctatggtgcaaattgcttttcagtatactgttgttgncccaccagatgaacttgcaaatgcaggatcaagttctacaacaagaacaaagcattccctcaaaaggaga

SEQ ID NO: 166 - DNA, 276 bp, Unknown Organism
  polynucleotide sequence that shows homology with sequences of unknown function
  misc_feature (5)..(5): n is a, c, g, or t
  misc_feature (60)..(60): n is a, c, g, or t
  misc_feature (94)..(94): n is a, c, g, or t
  misc_feature (99)..(99): n is a, c, g, or t
  misc_feature (241)..(241): n is a, c, g, or t
  misc_feature (244)..(244): n is a, c, g, or t
gcacntgtcgaaaatcaggattgatgtcaatgctgatcagcacccctttcagtacaaaanctaaatcaaccacagaagccagctaaggtggacntgaantccgcagtttatcctggcggtccaccttcaccggcaagggcgccaaagatgtcgcactttgtcgatacaacagaaatggtaagaggacctgaggagtcacctggctactgggtggtaactggtgcaaagctatgtgtagaanatngtaggataagaatgaaagtgaagtactcgctc

SEQ ID NO: 167 - DNA, 113 bp, Unknown Organism
  polynucleotide sequence that shows homology with sequences of unknown function
  misc_feature (7)..(7): n is a, c, g, or t
  misc_feature (16)..(17): n is a, c, g, or t
  misc_feature (19)..(19): n is a, c, g, or t
  misc_feature (41)..(41): n is a, c, g, or t
  misc_feature (53)..(53): n is a, c, g, or t
ccttttnaggccacgnntnggagcagcaaacacagcaaatntagcgatgaganagccagtattcataaaagtggatcagttgaaaccgggaacaagtggtcacaatctgacgg

SEQ ID NO: 168 - DNA, 268 bp, Unknown Organism
  polynucleotide sequence that shows homology with sequences of unknown function
  misc_feature (5)..(5): n is a, c, g, or t
ttttnctttggatacatggcttgcatctgctatggtttcttcctcatgctagggacgtgttggtttccgctcatccatgctctttgttcgtcacatttatcgatctatcaagtgcgagtaaacattttgtgtagtatttgtttcctccactttagcctctctacttcttcggggtagatgaaaagtctgcgtacacactacctctccagaccccattagtgggattttactggattgttgttgttgtttacaccactttggttatacc

SEQ ID NO: 169 - DNA, 318 bp, Unknown Organism
  polynucleotide sequence that shows homology with sequences of unknown function
ctcctactcctcagtgtttctcagccagccgtggaactacaaaggccactccatctaaggcaaagtatagacctctggagacaaggggtatccttcaagaactggaacagagcagcaatgaagagaagagaaaggaagatcaagggaagatgatgagtaataatcaacaaggacagagaggtggtgctattgttgctgaaaaagaagctgctgctagagctttggatgtcttctggttcttgaaaccttgcactctttccagctgaaatggtcaaagcccactgctgcagaacatttcatgaagtgattctttcatac

SEQ ID NO: 170 - DNA, 200 bp, Unknown Organism
  polynucleotide sequence that shows homology with sequences of unknown function
gttccctcctaccaaacttgaggaaatcaagtctatgcacagcccacagttagcacaaagggcttacagccaagagtcaatgtactaagaggagaaaggagccccagattgacgggcaagggacttgaaataaagcaaactcctagcccccagccatctaatctgggtcaaaatggtcgtggtccgtcttctacctagta

SEQ ID NO: 171 - DNA, 190 bp, Unknown Organism
  polynucleotide sequence that shows homology with sequences of unknown function
  misc_feature (1)..(1): n is a, c, g, or t
  misc_feature (4)..(4): n is a, c, g, or t
  misc_feature (8)..(8): n is a, c, g, or t
  misc_feature (16)..(16): n is a, c, g, or t
  misc_feature (21)..(21): n is a, c, g, or t
  misc_feature (27)..(27): n is a, c, g, or t
  misc_feature (41)..(41): n is a, c, g, or t
  misc_feature (59)..(59): n is a, c, g, or t
  misc_feature (80)..(80): n is a, c, g, or t
  misc_feature (109)..(110): n is a, c, g, or t
  misc_feature (115)..(115): n is a, c, g, or t
  misc_feature (170)..(170): n is a, c, g, or t
  misc_feature (181)..(181): n is a, c, g, or t
ntcnagantgatcgancaganggtgcngatgatactttggnaaggcctagtgaagaggncaactccagataatgaatcanagtttcaggtggaacaagagagagagcanntagcngcggacgaaagggaagagggagagctaattgctgatcctgaagatgttggaaatntcgagggagtnagcaattta

SEQ ID NO: 172 - DNA, 237 bp, Unknown Organism
  polynucleotide sequence that shows homology with sequences of unknown function
  misc_feature (6)..(6): n is a, c, g, or t
  misc_feature (9)..(10): n is a, c, g, or t
  misc_feature (12)..(12): n is a, c, g, or t
  misc_feature (16)..(16): n is a, c, g, or t
  misc_feature (20)..(20): n is a, c, g, or t
  misc_feature (30)..(30): n is a, c, g, or t
  misc_feature (35)..(36): n is a, c, g, or t
  misc_feature (53)..(53): n is a, c, g, or t
  misc_feature (62)..(62): n is a, c, g, or t
  misc_feature (64)..(64): n is a, c, g, or t
  misc_feature (68)..(68): n is a, c, g, or t
  misc_feature (72)..(72): n is a, c, g, or t
  misc_feature (85)..(85): n is a, c, g, or t
  misc_feature (102)..(102): n is a, c, g, or t
  misc_feature (107)..(107): n is a, c, g, or t
  misc_feature (120)..(120): n is a, c, g, or t
  misc_feature (131)..(131): n is a, c, g, or t
  misc_feature (133)..(133): n is a, c, g, or t
  misc_feature (138)..(138): n is a, c, g, or t
  misc_feature (151)..(151): n is a, c, g, or t
  misc_feature (155)..(155): n is a, c, g, or t
  misc_feature (170)..(170): n is a, c, g, or t
  misc_feature (181)..(181): n is a, c, g, or t
  misc_feature (183)..(183): n is a, c, g, or t
  misc_feature (192)..(192): n is a, c, g, or t
  misc_feature (200)..(200): n is a, c, g, or t
  misc_feature (210)..(210): n is a, c, g, or t
  misc_feature (213)..(213): n is a, c, g, or t
  misc_feature (228)..(229): n is a, c, g, or t
taaggncanncnaagnccancagtgccatnacgcnnattgcctgactgttcantgcctacantntgcngtanttctaatggcganctgaaaatggccaaggnccccnaaacctagagctntgtcagtagantngggtntatatttgaattngatnctgttgagtgataangatggtggacncnttgtacctntacctgantgcaaataangtnttgtcatcaacagannttatgcta

SEQ ID NO: 173 - DNA, 286 bp, Unknown Organism
  polynucleotide sequence that shows homology with sequences of unknown function
  misc_feature (7)..(7): n is a, c, g, or t
  misc_feature (9)..(9): n is a, c, g, or t
  misc_feature (13)..(13): n is a, c, g, or t
  misc_feature (15)..(15): n is a, c, g, or t
  misc_feature (30)..(30): n is a, c, g, or t
  misc_feature (37)..(39): n is a, c, g, or t
  misc_feature (46)..(46): n is a, c, g, or t
  misc_feature (52)..(53): n is a, c, g, or t
  misc_feature (56)..(57): n is a, c, g, or t
  misc_feature (59)..(59): n is a, c, g, or t
  misc_feature (61)..(61): n is a, c, g, or t
  misc_feature (66)..(68): n is a, c, g, or t
  misc_feature (70)..(70): n is a, c, g, or t
  misc_feature (77)..(77): n is a, c, g, or t
  misc_feature (79)..(79): n is a, c, g, or t
  misc_feature (89)..(89): n is a, c, g, or t
  misc_feature (106)..(106): n is a, c, g, or t
  misc_feature (113)..(113): n is a, c, g, or t
  misc_feature (123)..(123): n is a, c, g, or t
  misc_feature (131)..(131): n is a, c, g, or t
  misc_feature (133)..(133): n is a, c, g, or t
  misc_feature (139)..(139): n is a, c, g, or t
  misc_feature (144)..(144): n is a, c, g, or t
  misc_feature (147)..(147): n is a, c, g, or t
  misc_feature (153)..(153): n is a, c, g, or t
  misc_feature (174)..(174): n is a, c, g, or t
gttaagngnggcnangaggaggctgtttcnatgcagnnngtctggnctatcnngtnntntntaggnnnanatcctangnctcacctggntctctttaaccctgagnatcattncaccactttnactcaatntnctcagncccanctnttcctntcaaaattcgaaattattgtncccatagtatatactctgtttctggtcctccttttcctctgtgctgtagccacaattacatacagcacgcttcatgtatcctatggtagacctatcaacctcgtttcctcta

SEQ ID NO: 174 - DNA, 107 bp, Unknown Organism
  polynucleotide sequence that shows homology with sequences of unknown function
  misc_feature (5)..(5): n is a, c, g, or t
  misc_feature (61)..(61): n is a, c, g, or t
  misc_feature (75)..(75): n is a, c, g, or t
gtcgngcaaaagaagttgtggctcacaagtggaagcatcagagatacagaatagacagtgnagtttgaacacttnttcctgatttattttctctctgcctttaggga

SEQ ID NO: 175 - DNA, 72 bp, Unknown Organism
  polynucleotide sequence that shows homology with sequences of unknown function
  misc_feature (28)..(28): n is a, c, g, or t
  misc_feature (31)..(31): n is a, c, g, or t
  misc_feature (71)..(71): n is a, c, g, or t
atgagaagccaaggagtccctagtcttncgngcttgttacctggggcccaaaggagcaactagtgactcgna

SEQ ID NO: 176 - DNA, 108 bp, Unknown Organism
  polynucleotide sequence that shows homology with sequences of unknown function
  misc_feature (1)..(2): n is a, c, g, or t
  misc_feature (65)..(65): n is a, c, g, or t
  misc_feature (104)..(104): n is a, c, g, or t
nntcatcacctatgccactactcttcttctggagaggcgtgggaaagagattgtcttgaaagcantgggcacaggcaattagcaaaacagttgctatagcaganatca

SEQ ID NO: 177 - DNA, 124 bp, Unknown Organism
  polynucleotide sequence that shows homology with sequences of unknown function
  misc_feature (55)..(55): n is a, c, g, or t
  misc_feature (80)..(80): n is a, c, g, or t
  misc_feature (83)..(83): n is a, c, g, or t
  misc_feature (93)..(93): n is a, c, g, or t
  misc_feature (102)..(102): n is a, c, g, or t
ttcggccaagctgacgcttcctctttcaaacaggtagatcaaatgcttactgggncctctgaaaccgccaaggttgcagntantccgggtcgngctgagccngttagacatcctatcccgccca

SEQ ID NO: 178 - DNA, 217 bp, Unknown Organism
  polynucleotide sequence that shows homology with sequences of unknown function
  misc_feature (4)..(4): n is a, c, g, or t
  misc_feature (6)..(6): n is a, c, g, or t
  misc_feature (15)..(15): n is a, c, g, or t
  misc_feature (35)..(35): n is a, c, g, or t
  misc_feature (56)..(56): n is a, c, g, or t
  misc_feature (66)..(66): n is a, c, g, or t
  misc_feature (98)..(98): n is a, c, g, or t
  misc_feature (109)..(109): n is a, c, g, or t
  misc_feature (139)..(139): n is a, c, g, or t
  misc_feature (174)..(174): n is a, c, g, or t
  misc_feature (179)..(179): n is a, c, g, or t
  misc_feature (188)..(188): n is a, c, g, or t
cgtngnccaactcanggctgaacaagtgatgaagngcccttcacgggttcctctgnaagaaccagnggcagttggtggtaaacatatgtcaaagtctncaagtatgaanggaatcatcacccctgcgccaaggttgagnttctccccttccttacctatcacccgagcatcggnttctncctcaaagncttctacgcagccctcgtctcgtccttca

SEQ ID NO: 179 - DNA, 81 bp, Unknown Organism
  polynucleotide sequence that shows homology with sequences of unknown function
  misc_feature (3)..(3): n is a, c, g, or t
cgngtggaaatcgcccgtaactgacctgacatttccggagtttactgaggaagagtcaacgtgggacatgtgttcggataa

SEQ ID NO: 180 - DNA, 301 bp, Unknown Organism
  polynucleotide sequence that shows homology with sequences of unknown function
  misc_feature (1)..(1): n is a, c, g, or t
  misc_feature (12)..(12): n is a, c, g, or t
  misc_feature (140)..(140): n is a, c, g, or t
  misc_feature (142)..(142): n is a, c, g, or t
  misc_feature (178)..(178): n is a, c, g, or t
  misc_feature (211)..(211): n is a, c, g, or t
ntactggtactngagcgggggaatttttcgattatctgctgggctgattccattcagtaatgctttccgggaatgtataataaaatgccgagttggtgactgagaagaaaccttgtaaataaaatcacatagttcgttgnangagtcgtggtcatcaactccaattctgcatttcacnctcactggaacatttgtatttgcagcaattacncacatggcctcagcaacaaactttggatcaagcatgagtcgcacaccaaaacacccatgtccagctactttagggctaggacatccgcaa

SEQ ID NO: 181 - DNA, 84 bp, Unknown Organism
  polynucleotide sequence that shows homology with sequences of unknown function
  misc_feature (13)..(13): n is a, c, g, or t
  misc_feature (22)..(22): n is a, c, g, or t
  misc_feature (24)..(24): n is a, c, g, or t
  misc_feature (38)..(38): n is a, c, g, or t
agtgcccattttntcaggttgnanaatgagcaccttgnaataacgtcgggaaatatcgtgccttcaagtccgtaccattgcctt

SEQ ID NO: 182 - DNA, 254 bp, Unknown Organism
  polynucleotide sequence that shows homology with sequences of unknown function
  misc_feature (32)..(32): n is a, c, g, or t
attcccggtttaacctccagtatcctgttttnctgatgaagacatgctagaggtcccaacatatgctttagaaggctagaaacttgtgaagatagcagatggtcataattgtaaaacttgggtgtcatgaaaatatacgtatcacgacaatgactggtggctgcaaagttgaatgtgttgctgatggtgactgtatagttagttgaatgtgttgctgatggtggcaagagagggtttatacttttggttgtgtt

SEQ ID NO: 183 - DNA, 83 bp, Unknown Organism
  polynucleotide sequence that shows homology with sequences of unknown function
  misc_feature (3)..(5): n is a, c, g, or t
  misc_feature (7)..(7): n is a, c, g, or t
  misc_feature (20)..(20): n is a, c, g, or t
  misc_feature (23)..(23): n is a, c, g, or t
  misc_feature (28)..(28): n is a, c, g, or t
  misc_feature (37)..(37): n is a, c, g, or t
  misc_feature (67)..(67): n is a, c, g, or t
  misc_feature (75)..(75): n is a, c, g, or t
  misc_feature (80)..(80): n is a, c, g, or t
  misc_feature (82)..(82): n is a, c, g, or t
ccnnngnaaatcccatacanatnttgcnctaaacttnctcaccgaaacaaacctggatgttctctgngaactggntgatntnc

SEQ ID NO: 184 - DNA, 95 bp, Unknown Organism
  polynucleotide sequence that shows homology with sequences of unknown function
  misc_feature (2)..(2): n is a, c, g, or t
  misc_feature (12)..(12): n is a, c, g, or t
  misc_feature (34)..(34): n is a, c, g, or t
  misc_feature (78)..(78): n is a, c, g, or t
cntttggaaccnccctcaagctgaaaaagaggangggattatacctcttaccgacacattgccaattatgccacaggntttatgtcaccatgccc

SEQ ID NO: 185 - DNA, 159 bp, Unknown Organism
  polynucleotide sequence that shows homology with sequences of unknown function
  misc_feature (1)..(1): n is a, c, g, or t
  misc_feature (15)..(15): n is a, c, g, or t
  misc_feature (27)..(27): n is a, c, g, or t
  misc_feature (33)..(33): n is a, c, g, or t
  misc_feature (35)..(35): n is a, c, g, or t
  misc_feature (44)..(45): n is a, c, g, or t
  misc_feature (47)..(47): n is a, c, g, or t
  misc_feature (51)..(51): n is a, c, g, or t
  misc_feature (54)..(54): n is a, c, g, or t
  misc_feature (57)..(57): n is a, c, g, or t
  misc_feature (62)..(62): n is a, c, g, or t
  misc_feature (65)..(66): n is a, c, g, or t
  misc_feature (78)..(78): n is a, c, g, or t
  misc_feature (81)..(81): n is a, c, g, or t
  misc_feature (85)..(85): n is a, c, g, or t
  misc_feature (87)..(87): n is a, c, g, or t
  misc_feature (93)..(93): n is a, c, g, or t
  misc_feature (102)..(102): n is a, c, g, or t
  misc_feature (104)..(104): n is a, c, g, or t
  misc_feature (110)..(110): n is a, c, g, or t
  misc_feature (128)..(128): n is a, c, g, or t
  misc_feature (136)..(136): n is a, c, g, or t
nagcgcttggtcttncctcactgcttntggtgntnaatcttggnntntgtnccnagncgtcntcnntaacatgaagcntanggtnanaaaggnagaaaagtntnctgctngaagggctatcttgcccntgcttcangctgaagaggatgaaagattcgt

SEQ ID NO: 186 - DNA, 157 bp, Unknown Organism
  polynucleotide sequence that shows homology with sequences of unknown function
  misc_feature (8)..(9): n is a, c, g, or t
  misc_feature (47)..(47): n is a, c, g, or t
  misc_feature (109)..(109): n is a, c, g, or t
  misc_feature (114)..(114): n is a, c, g, or t
  misc_feature (127)..(127): n is a, c, g, or t
  misc_feature (129)..(129): n is a, c, g, or t
  misc_feature (133)..(133): n is a, c, g, or t
  misc_feature (142)..(142): n is a, c, g, or t
gcttaganntcttgaaggtgacctgataatggaatctggccaattgnctacaacacctaggtatgatgtgggaagccaaagtggaaggattttgtctgatcactacatncagcntcataggtacagngnctcnatactaaangatgggttggaggga

SEQ ID NO: 187 - DNA, 81 bp, Unknown Organism
  polynucleotide sequence that shows homology with sequences of unknown function
  misc_feature (12)..(12): n is a, c, g, or t
  misc_feature (28)..(28): n is a, c, g, or t
  misc_feature (77)..(77): n is a, c, g, or t
cttggatggtcnaccagattgaagaacncgagaaaaagctgttttctcatccacttcataagtcacaaaatgaacancagc

SEQ ID NO: 188 - DNA, 151 bp, Unknown Organism
  polynucleotide sequence that shows homology with sequences of unknown function
  misc_feature (3)..(3): n is a, c, g, or t
  misc_feature (15)..(15): n is a, c, g, or t
  misc_feature (17)..(17): n is a, c, g, or t
  misc_feature (20)..(21): n is a, c, g, or t
  misc_feature (23)..(23): n is a, c, g, or t
  misc_feature (31)..(31): n is a, c, g, or t
  misc_feature (45)..(45): n is a, c, g, or t
  misc_feature (48)..(49): n is a, c, g, or t
  misc_feature (56)..(57): n is a, c, g, or t
  misc_feature (68)..(69): n is a, c, g, or t
  misc_feature (74)..(74): n is a, c, g, or t
  misc_feature (80)..(80): n is a, c, g, or t
  misc_feature (83)..(83): n is a, c, g, or t
  misc_feature (91)..(91): n is a, c, g, or t
  misc_feature (97)..(97): n is a, c, g, or t
  misc_feature (106)..(106): n is a, c, g, or t
  misc_feature (123)..(123): n is a, c, g, or t
  misc_feature (128)..(128): n is a, c, g, or t
ganagcccatgctgntntannanaagctgcngaggctgacttggnggnnctgtacnnaggataccaanntgttnttgctnatncacgctanaagggngactattangcctaaggatattcagntggcnaggcgtattacgggagaaagggc

SEQ ID NO: 189 - DNA, 159 bp, Unknown Organism
  polynucleotide sequence that shows homology with sequences of unknown function
  misc_feature (12)..(12): n is a, c, g, or t
  misc_feature (27)..(27): n is a, c, g, or t
cgttagtacgcncatctgataatgacnttgagagtgcaaaatgcatgagcttgttgtcaaataatcatcatcatttcagtacaaggccaaaggctgattttacaaatcaggtcatccgcaaaatgagggacttaccagctgcaaagttatctcagttgc

SEQ ID NO: 190 - DNA, 223 bp, Unknown Organism
  polynucleotide sequence that shows homology with sequences of unknown function
  misc_feature (12)..(12): n is a, c, g, or t
accttggaattncttactgaatgactaaatgacttgctcgaaggacgaggtggtggcattagagcacgggcagatattttgccccttcttgatttttcatcgctggacatgctagaagctgctttcactgatgtactagaagcttgttctcttgcacttttatcagtcaactcgtcatcagcatcatcacttgagcttccactttcaaagaagtcatcgctgc

SEQ ID NO: 191 - DNA, 393 bp, Unknown Organism
  polynucleotide sequence that shows homology with sequences of unknown function
  misc_feature (6)..(6): n is a, c, g, or t
  misc_feature (19)..(20): n is a, c, g, or t
  misc_feature (32)..(32): n is a, c, g, or t
  misc_feature (36)..(36): n is a, c, g, or t
  misc_feature (51)..(51): n is a, c, g, or t
  misc_feature (190)..(190): n is a, c, g, or t
  misc_feature (199)..(199): n is a, c, g, or t
  misc_feature (327)..(327): n is a, c, g, or t
acaccnatttcaactaccnngagctgacagcntacncaatacaccgcagangctttttgcttactccaaagttgctccctaatctggaatacagcgaagcatgcagcattttgactgtaatgaatggtccttggattgagcagccatccaaagcttggagtggtggagaatgctggaggtctgtgatggnactaatggnggaacgttgtcgctgactagaagcagaaatactttaggttgattcgaacaggatttgtccataagaaaaatttgcttccttgttgatctgccattgcgctagttacaagctgaatcatggtcgctcanctatgttttttgaaaaatctgttattactggcccttgttctaaaataacataattcttttgtacgc

SEQ ID NO: 192 - DNA, 198 bp, Unknown Organism
  polynucleotide sequence that shows homology with sequences of unknown function
  misc_feature (7)..(8): n is a, c, g, or t
  misc_feature (26)..(26): n is a, c, g, or t
  misc_feature (28)..(28): n is a, c, g, or t
  misc_feature (44)..(44): n is a, c, g, or t
  misc_feature (73)..(73): n is a, c, g, or t
  misc_feature (102)..(102): n is a, c, g, or t
  misc_feature (112)..(112): n is a, c, g, or t
  misc_feature (188)..(188): n is a, c, g, or t
cgtttgnntcacgttctaatgtacgntnacttcattggaaacantcctacacattcagagacgaaactggcanactcttacctctatgacaaagctacatgnattcttgctnggaaactcttcctcccggaaacagatttcaatctggaccatctagctgcaaatcctcttgtaccagaaaaagatanactcttggac

SEQ ID NO: 193 - DNA, 191 bp, Unknown Organism
  polynucleotide sequence that shows homology with sequences of unknown function
  misc_feature (21)..(21): n is a, c, g, or t
  misc_feature (76)..(76): n is a, c, g, or t
  misc_feature (107)..(107): n is a, c, g, or t
ccttggaattgcctccattgntgcgggccaggcgttcctgatgtatggaacgagttgctatttcaatttttgtganaagaacaggtgcactttgtaagtaatctttncactatcattggagaaaagaaaagttcacaccttgaacgtaatgtacatctcgaatgagcacgcccatgtttctactgttagta

SEQ ID NO: 194 - DNA, 81 bp, Unknown Organism
  polynucleotide sequence that shows homology with sequences of unknown function
  misc_feature (20)..(20): n is a, c, g, or t
  misc_feature (70)..(70): n is a, c, g, or t
cctttctagtttgcatcacntgcatttgactttggggactcaacacaggggttgggtccgtctaggacangtgtacccaaa

SEQ ID NO: 195 - DNA, 73 bp, Unknown Organism
  polynucleotide sequence that shows homology with sequences of unknown function
  misc_feature (5)..(6): n is a, c, g, or t
ccttnnacattttctggttagcctctggtttgtttttgatgtttttagcaccggtgtgcataatccagtgtgc

SEQ ID NO: 196 - DNA, 316 bp, Unknown Organism
  polynucleotide sequence that shows homology with sequences of unknown function
  misc_feature (3)..(4): n is a, c, g, or t
  misc_feature (6)..(6): n is a, c, g, or t
  misc_feature (11)..(11): n is a, c, g, or t
  misc_feature (16)..(17): n is a, c, g, or t
  misc_feature (40)..(41): n is a, c, g, or t
  misc_feature (44)..(45): n is a, c, g, or t
  misc_feature (54)..(54): n is a, c, g, or t
  misc_feature (66)..(66): n is a, c, g, or t
  misc_feature (75)..(75): n is a, c, g, or t
  misc_feature (114)..(114): n is a, c, g, or t
  misc_feature (165)..(165): n is a, c, g, or t
  misc_feature (173)..(173): n is a, c, g, or t
  misc_feature (175)..(175): n is a, c, g, or t
  misc_feature (191)..(191): n is a, c, g, or t
  misc_feature (201)..(201): n is a, c, g, or t
  misc_feature (210)..(210): n is a, c, g, or t
  misc_feature (212)..(212): n is a, c, g, or t
  misc_feature (248)..(248): n is a, c, g, or t
  misc_feature (292)..(292): n is a, c, g, or t
  misc_feature (304)..(304): n is a, c, g, or t
gtnngngagcntggcnnaggatgcagactaccaaagctcnnaannaagcttctntgaacactctcntaataggtnagatgtaatggtctttcagaatggccaacacagcaatantgccttgagtgtcccaaatcactgatgccatgatgtgggctcctagactgncctgactntngctttgactgtgccantgccacctcntggtagccntnagttttcatgatgctttgccttggagatcatattgncgaagccatgttccaactgccgcttacaatttgtcagagggatncgtcaggatcgngaaccctcctgt

SEQ ID NO: 197 - DNA, 190 bp, Unknown Organism
  polynucleotide sequence that shows homology with sequences of unknown function
  misc_feature (7)..(7): n is a, c, g, or t
  misc_feature (10)..(10): n is a, c, g, or t
  misc_feature (18)..(18): n is a, c, g, or t
  misc_feature (28)..(29): n is a, c, g, or t
  misc_feature (40)..(40): n is a, c, g, or t
  misc_feature (46)..(46): n is a, c, g, or t
  misc_feature (49)..(49): n is a, c, g, or t
  misc_feature (56)..(56): n is a, c, g, or t
  misc_feature (60)..(60): n is a, c, g, or t
  misc_feature (65)..(65): n is a, c, g, or t
  misc_feature (67)..(68): n is a, c, g, or t
  misc_feature (73)..(73): n is a, c, g, or t
  misc_feature (75)..(75): n is a, c, g, or t
  misc_feature (77)..(78): n is a, c, g, or t
  misc_feature (81)..(81): n is a, c, g, or t
  misc_feature (83)..(85): n is a, c, g, or t
  misc_feature (100)..(100): n is a, c, g, or t
  misc_feature (116)..(116): n is a, c, g, or t
  misc_feature (123)..(124): n is a, c, g, or t
  misc_feature (126)..(126): n is a, c, g, or t
  misc_feature (132)..(132): n is a, c, g, or t
  misc_feature (139)..(139): n is a, c, g, or t
  misc_feature (141)..(142): n is a, c, g, or t
  misc_feature (145)..(145): n is a, c, g, or t
  misc_feature (151)..(151): n is a, c, g, or t
  misc_feature (159)..(159): n is a, c, g, or t
  misc_feature (163)..(163): n is a, c, g, or t
  misc_feature (166)..(166): n is a, c, g, or t
  misc_feature (168)..(169): n is a, c, g, or t
  misc_feature (182)..(182): n is a, c, g, or t
  misc_feature (184)..(184): n is a, c, g, or t
tgcgganccngggcatgncagcacgccnnaggaccatgcnagcagnatnactgctncagnagatngnnatgangngnntgncnnnatgtttgttagtccngcgtgtcttttaatanatcatcnntnaccgcntaggttngnncancactgncgaggctnttangtnanntaagagtctgtcntngtctag

SEQ ID NO: 198 - DNA, 253 bp, Unknown Organism
  polynucleotide sequence that shows homology with sequences of unknown function
agtgcaatgagtatagctattgaggctattgaatctggcgctgtcaatgctgcttctgtccttgagcaaattgagctccaaatagctcaagctaaagaggaagcttttagcagaaaagacattctagacaaagtcgagaaatggattgctgcttgtgaggaggagtgttggcttgaggagtataacagggatgaaaatcgctataatgctggacgaggcacccaccttaccctgaagcgtgctgagaaagctc

SEQ ID NO: 199 - DNA, 375 bp, Unknown Organism
  polynucleotide sequence that shows homology with sequences of unknown function
  misc_feature (11)..(11): n is a, c, g, or t
  misc_feature (20)..(20): n is a, c, g, or t
caaagtacganagcgatggntctatctctcagctgcaggcaatgccaagtcgccttgacttcaccactgaattcctctctctagctgctcatgaagctattgtctgtcgttgtcatccagttactgttgcttctctgtcacttctcttgaacttctatcccacagggaaacagatgccaacaactgaggttgtagttttcaggactttagtcacgactctatctcagggtcctcagaatgattctgatatcctaaagcaaatgaaacgagctcacactcggctatctgagctaggtgctgacaaattttttgggaaaggtgagattgggagacgggaaaggaactggttttcagtgaatgcatggaattccggtg

SEQ ID NO: 200 - DNA, 516 bp, Unknown Organism
  polynucleotide sequence that shows homology with sequences of unknown function
  misc_feature (7)..(7): n is a, c, g, or t
  misc_feature (13)..(13): n is a, c, g, or t
  misc_feature (19)..(19): n is a, c, g, or t
  misc_feature (22)..(22): n is a, c, g, or t
  misc_feature (25)..(26): n is a, c, g, or t
  misc_feature (36)..(37): n is a, c, g, or t
  misc_feature (41)..(41): n is a, c, g, or t
  misc_feature (44)..(44): n is a, c, g, or t
  misc_feature (194)..(194): n is a, c, g, or t
  misc_feature (239)..(239): n is a, c, g, or t
  misc_feature (422)..(422): n is a, c, g, or t
ctgggcngacatngcctantgnggnntttctgaggnntccnatngacatgattgtggggactccaggcagggttctacaacatattgaagagggaaacgtggtttatggtgacatcagatacttggtcttggatgaggctgataccatgtttgatcgcggttttggtcctgatatacgaaaatttcttgcaccnctgaaaaaccgtgcttcgaagcctggtgatgaaggatttcaaacngtgttggtgacagcaacaatgacaaaggcagttcaaaagctggttgacgaggagtttcaagggattcagcatttacgtacttctacattacataagaagattgcttctgctcgtcatgatttcatcaaactttcaggttctgagaacaagctggaggcgttgctacaggttcttgagccaagnttagcaaagggcaatagagtgatggtattctgtaacacgttgaattccagtcgtgctgtggatcactttctcagtgaaaaccaattttctactg

SEQ ID NO: 201 - DNA, 126 bp, Unknown Organism
  polynucleotide sequence that shows homology with sequences of unknown function
  misc_feature (4)..(5): n is a, c, g, or t
  misc_feature (21)..(21): n is a, c, g, or t
  misc_feature (33)..(33): n is a, c, g, or t
  misc_feature (43)..(43): n is a, c, g, or t
  misc_feature (86)..(87): n is a, c, g, or t
tttnncaacctttggtattgngctcactttttnctatggcagncttggcttcttggtggctggcaagaacggaaagaatggtcaanncttcatcaaccatgcaattgcttgaatctgtcagcatcg

SEQ ID NO: 202 - DNA, 172 bp, Unknown Organism
  polynucleotide sequence that shows homology with sequences of unknown function
  misc_feature (2)..(2): n is a, c, g, or t
  misc_feature (72)..(72): n is a, c, g, or t
angttggccaaggcacttgcgaaattctttggtgccaggctactgatagttgattctctcttattacctggnggatcaactgccaaagacattgactctgtaaaggaaagttctaaacctgagagagcaagtactttcgctaaacgtgctgctcaggtggctgcactacatc

SEQ ID NO: 203 - DNA, 238 bp, Unknown Organism
  polynucleotide sequence that shows homology with sequences of unknown function
cacttgctactctagcaactgaaggattggtttctgttcatggtgacgctgtgaagagaatatgatgagtctaaattaggagtgaggcattctcaaattcattgctcagggagcagaagttgatatgtggattgctactatttgcaagagcactttgcgggcatgttaggcaaagtcatgtttttttgttcctgatcagcattcttcactatctgccctttgaaacagttagccatac

SEQ ID NO: 204 - DNA, 263 bp, Unknown Organism
  polynucleotide sequence that shows homology with sequences of unknown function
  misc_feature (1)..(1): n is a, c, g, or t
  misc_feature (8)..(8): n is a, c, g, or t
  misc_feature (14)..(14): n is a, c, g, or t
  misc_feature (29)..(29): n is a, c, g, or t
  misc_feature (31)..(31): n is a, c, g, or t
  misc_feature (35)..(36): n is a, c, g, or t
  misc_feature (38)..(38): n is a, c, g, or t
  misc_feature (40)..(40): n is a, c, g, or t
  misc_feature (49)..(49): n is a, c, g, or t
  misc_feature (52)..(52): n is a, c, g, or t
  misc_feature (56)..(56): n is a, c, g, or t
  misc_feature (59)..(59): n is a, c, g, or t
  misc_feature (61)..(61): n is a, c, g, or t
  misc_feature (68)..(68): n is a, c, g, or t
  misc_feature (86)..(86): n is a, c, g, or t
  misc_feature (106)..(106): n is a, c, g, or t
  misc_feature (134)..(134): n is a, c, g, or t
  misc_feature (159)..(159): n is a, c, g, or t
  misc_feature (180)..(180): n is a, c, g, or t
  misc_feature (209)..(209): n is a, c, g, or t
  misc_feature (213)..(213): n is a, c, g, or t
  misc_feature (222)..(222): n is a, c, g, or t
  misc_feature (236)..(236): n is a, c, g, or t
ngaccgcngcgatnctagaatcagttgananttgnngntnggacatggnatntctngcncntgaagcntttttgtcatcgacgatnatgaatttctacatccggtncctccagaagacaaaagctcatgcagangtagatgagtatcactttttcaatncatatttctacaagaagctcnaagaggctgtactgagcaagaaaggaatngcanatgctttgntggaatatcaactnccaacagctacctgaaagcaaagtgcc

SEQ ID NO: 205 - DNA, 297 bp, Unknown Organism
  polynucleotide sequence that shows homology with sequences of unknown function
  misc_feature (10)..(10): n is a, c, g, or t
  misc_feature (73)..(73): n is a, c, g, or t
  misc_feature (87)..(87): n is a, c, g, or t
tcaaccaagntgttcctattggttcaagcttcttcttcaatcaacttgcctttgcattttcttccaaagaggnattttaggtacagnaaaaagatagtgcctttgaaattgcggtttagttgtaaaagcaaaaatcttgaaagagaagcatgtgctgatgatactcaaactgctaaagcaatcacatcgcatagttctaaactcgaagacgttatctggtttcagtgtcggcatattatcaagggcttggcttccaggatttctccaactgaagagtgaggatggcttccttcttcc

SEQ ID NO: 206 - DNA, 169 bp, Unknown Organism
  polynucleotide sequence that shows homology with sequences of unknown function
  misc_feature (1)..(1): n is a, c, g, or t
ncaatgacagtgcttgctccagcttcccttacttccccaccttctgtggtgtcattgagcacttcaccaacatcaccaatgagtcccttcattggttcttctgatttcacagagagagtgagtatcgataagcaaataactgctgctcagagcaatagcttggtatcag

SEQ ID NO: 207 - DNA, 189 bp, Unknown Organism
  polynucleotide sequence that shows homology with sequences of unknown function
  misc_feature (16)..(16): n is a, c, g, or t
  misc_feature (19)..(19): n is a, c, g, or t
  misc_feature (27)..(27): n is a, c, g, or t
  misc_feature (32)..(32): n is a, c, g, or t
  misc_feature (34)..(34): n is a, c, g, or t
  misc_feature (39)..(39): n is a, c, g, or t
  misc_feature (44)..(44): n is a, c, g, or t
  misc_feature (52)..(52): n is a, c, g, or t
  misc_feature (61)..(61): n is a, c, g, or t
  misc_feature (71)..(71): n is a, c, g, or t
  misc_feature (84)..(84): n is a, c, g, or t
  misc_feature (106)..(106): n is a, c, g, or t
  misc_feature (122)..(122): n is a, c, g, or t
  misc_feature (140)..(140): n is a, c, g, or t
  misc_feature (146)..(148): n is a, c, g, or t
  misc_feature (150)..(150): n is a, c, g, or t
  misc_feature (152)..(152): n is a, c, g, or t
  misc_feature (160)..(160): n is a, c, g, or t
  misc_feature (167)..(167): n is a, c, g, or t
ttgcttccttgatagngcntgacagangcctnangaccntccantcaggatnactcattcnggaggttgcntgaggagattttntttatgtttttagactgctgcncttttttatatcatcntttaccgactagctttgnacagannngncnaggctttnagggganggtagagtttgtcatagtctag

SEQ ID NO: 208 - DNA, 118 bp, Unknown Organism
  polynucleotide sequence that shows homology with sequences of unknown function
  misc_feature (24)..(24): n is a, c, g, or t
  misc_feature (98)..(98): n is a, c, g, or t
agatgataaaagtctggacgaggntggggacccgacgctgcccatcttagaggacggcgtaccaactgagaataagaatataactaactcacaccttnctctgcaaattccagacctc

SEQ ID NO: 209 - DNA, 164 bp, Unknown Organism
  polynucleotide sequence that shows homology with sequences of unknown function
  misc_feature (2)..(5): n is a, c, g, or t
  misc_feature (11)..(12): n is a, c, g, or t
  misc_feature (23)..(24): n is a, c, g, or t
  misc_feature (29)..(29): n is a, c, g, or t
  misc_feature (41)..(41): n is a, c, g, or t
  misc_feature (61)..(61): n is a, c, g, or t
  misc_feature (63)..(63): n is a, c, g, or t
  misc_feature (65)..(65): n is a, c, g, or t
  misc_feature (93)..(93): n is a, c, g, or t
cnnnncactcnngaaatactttnncgccnggctactgatanttgattctctcttattaccngntntttcaactgccaaagacattgactctgnaaaggaaagttctaaacctgagagagcaagtactttcgctaaacgtgctgctcaggtggctgcactacatc

SEQ ID NO: 210 - DNA, 180 bp, Unknown Organism
  polynucleotide sequence that shows homology with sequences of unknown function
  misc_feature (7)..(7): n is a, c, g, or t
  misc_feature (24)..(24): n is a, c, g, or t
  misc_feature (111)..(111): n is a, c, g, or t
  misc_feature (173)..(173): n is a, c, g, or t
ttttganggccttaagctacatcngaggaatgaagagtattatcggttgatttcaccacacatataatgcgcactggacctacataatcctggaaactgtaatgtcaaggnggttgaagcggaatcttcacaatcattcaaaggaagaatcacaatgctgcctatcagttttnatgatgc

SEQ ID NO: 211 - DNA, 264 bp, Unknown Organism
  polynucleotide sequence that shows homology with sequences of unknown function
  misc_feature (6)..(7): n is a, c, g, or t
  misc_feature (34)..(34): n is a, c, g, or t
  misc_feature (39)..(39): n is a, c, g, or t
  misc_feature (46)..(46): n is a, c, g, or t
  misc_feature (52)..(52): n is a, c, g, or t
cgcgtnngtcttaacggctggtcggctggcatancggtnatacggnttattntgccagtaagtttggcctcaaaggactggcagaagcattgcagcaggaggttattggcgaaaatattcacgtatcactaatatttcccccggacactgaaactcctggatttgctgaagagaacaaaagaaggccacgggtgactagtataatagcagcctcttctggtgccatgaaagctgacgaagttgccaagatagctttgaatggca

SEQ ID NO: 212 - DNA, 91 bp, Unknown Organism
  polynucleotide sequence that shows homology with sequences of unknown function
  misc_feature (5)..(5): n is a, c, g, or t
  misc_feature (8)..(8): n is a, c, g, or t
  misc_feature (67)..(67): n is a, c, g, or t
ggcanttnttttctattacttcccagccttgggtggaatggagtatgtcttacatcacgggctctcnatgtttgcaattgttcaatccctt

SEQ ID NO: 213 - DNA, 124 bp, Unknown Organism
  polynucleotide sequence that shows homology with sequences of unknown function
  misc_feature (2)..(2): n is a, c, g, or t
  misc_feature (12)..(12): n is a, c, g, or t
  misc_feature (22)..(23): n is a, c, g, or t
gntggaatgccnaaagaagcanncgacccctgtcctatcagtgtctattcttcagtttgctagatgagaaaagatcatattttgtgcaaagcaatcaaccaaacttagttgctgttgctgtagt

SEQ ID NO: 214 - DNA, 92 bp, Unknown Organism
  polynucleotide sequence that shows homology with sequences of unknown function
  misc_feature (43)..(43): n is a, c, g, or t
  misc_feature (57)..(57): n is a, c, g, or t
  misc_feature (65)..(65): n is a, c, g, or t
  misc_feature (73)..(73): n is a, c, g, or t
  misc_feature (82)..(82): n is a, c, g, or t
  misc_feature (90)..(90): n is a, c, g, or t
cttcttatcttctacaaattggctcaatatttttagtcttacnattttatctttttntaattttnataaaganatataattnatttgagnga

SEQ ID NO: 215 - DNA, 184 bp, Unknown Organism
  polynucleotide sequence that shows homology with sequences of unknown function
  misc_feature (4)..(4): n is a, c, g, or t
  misc_feature (15)..(15): n is a, c, g, or t
  misc_feature (134)..(134): n is a, c, g, or t
ttcngttactggggntgatgatttgacaaacccgaagtggtatgtggtgtggtctgcaaatatgaacactcacattcttcccgaatgcgtagttagctacaaatatggacgtcatatgtcaggtcaagcaaatngtgcttcatccatgaagtgggctcctcatgcttcaaatgcaatgggtaca

SEQ ID NO: 216 - DNA, 403 bp, Unknown Organism
  polynucleotide sequence that shows homology with sequences of unknown function
  misc_feature (2)..(2): n is a, c, g, or t
  misc_feature (170)..(170): n is a, c, g, or t
  misc_feature (351)..(351): n is a, c, g, or t
  misc_feature (357)..(357): n is a, c, g, or t
gnagcaattatccttccttttctcttttcaattatttttcgtaagggtagttgctgataggtttggaggtccaatggcgattggcatgaagcagatgtccataataatagcaacccttggtgttttatcctttgtatttggagttattgctgaaaacaagaagcctgcanctgggactgcaataccaggaaaaggcgttgttatttgtaaatacaagtctgaccctactgttgccttgggctatttgtcttttgctcttcttgttgcatcttctgtggccggtttcctgtcgttattttatccgtatcaagggaagtcaatcccacaagctgctttgctcaaaaacactanttttgntgtgttcctcaacatcgcattgggcacaactggtttagcagcagca

SEQ ID NO: 217 - DNA, 110 bp, Unknown Organism
  polynucleotide sequence that shows homology with sequences of unknown function
aatgaatatctccatgactagaaaattgtagacatgacacattcttttcttctgctttgcaggctcagtgaagctttcatttggctagattcgtggattttgttatcagt

SEQ ID NO: 218 - DNA, 119 bp, Unknown Organism
  polynucleotide sequence that shows homology with sequences of unknown function
caaagaagaagatgggtcgtcatcatcatcatcataatgaaggaaatagaccatatgatgatccattcttggcatgttgttgttgtccttgttttgtagtttcttctactttctctgtg

SEQ ID NO: 219 - DNA, 139 bp, Unknown Organism
  polynucleotide sequence that shows homology with sequences of unknown function
  misc_feature (2)..(2): n is a, c, g, or t
  misc_feature (103)..(103): n is a, c, g, or t
gnaggttcatatctcaaggtcaaagaagaagatgggtcgtcatcatcatcatcataatgaaggaaatagaccatatgatgatccattcttggcatgttgttgntgtccttgttttgtagtttcttctactttctctgtg

SEQ ID NO: 220 - DNA, 232 bp, Unknown Organism
  polynucleotide sequence that shows homology with sequences of unknown function
  misc_feature (33)..(33): n is a, c, g, or t
  misc_feature (88)..(88): n is a, c, g, or t
  misc_feature (181)..(181): n is a, c, g, or t
ggaaataccccacgcttcagcagatcaaggaanccttcctgaatcagctacttctgctgcacatgaggcatctattcgcgaatttgcngaggctgtccgtgcttatcgagctattttccatgattcagaacagcaactctctagacttgcacaaaatgtacctaaaatgcatttcgaagcngcccagcagcacatcaagaaacgacttgcttcttccaatcttgttgccatg

SEQ ID NO: 221 - DNA, 185 bp, Unknown Organism
  polynucleotide sequence that shows homology with sequences of unknown function
  misc_feature (17)..(17): n is a, c, g, or t
  misc_feature (163)..(163): n is a, c, g, or t
gaaaagcaaaaataagncgacatggggtttatttggaagaagaagattgggactttgaataataagaagcgtaagtgggaggagaatagatcacggcggcagccatagctccagggaacactacatatttagctatcagcgccaccttcctcaccaatggctntcccttcatcaacgccatttgc

SEQ ID NO: 222 - DNA, 233 bp, Unknown Organism
  polynucleotide sequence that shows homology with sequences of unknown function
  misc_feature (1)..(1): n is a, c, g, or t
  misc_feature (4)..(5): n is a, c, g, or t
  misc_feature (34)..(34): n is a, c, g, or t
nctnnaaaggccactcaagttcctgatataaaangacatagtatttgcacatcacctttgcacatccttccattttcttcatatcaactctagatcactcataatatccgatgtaaatgtcatgcaaatagttattgtactatattgtgtaaggaataaggacaagaaaaaagtctgtacatgttcagtacagacgcaatttttttttccaatatttccaatccttggttgcc

SEQ ID NO: 223 - DNA, 272 bp, Unknown Organism
  polynucleotide sequence that shows homology with sequences of unknown function
  misc_feature (7)..(7): n is a, c, g, or t
  misc_feature (16)..(16): n is a, c, g, or t
  misc_feature (34)..(34): n is a, c, g, or t
  misc_feature (44)..(44): n is a, c, g, or t
  misc_feature (92)..(92): n is a, c, g, or t
  misc_feature (146)..(146): n is a, c, g, or t
  misc_feature (157)..(157): n is a, c, g, or t
tttgcanacagtcccntactttcccgactacttncaataggatnctgaagatgcctttgattcatcttctgacattctagcctatccgtggncaatcaacacaaagtattataatgctgatggttctatttggatggcccatcttnatgaggacttntccattggagctttgccagcatttgaccaccttattgcattggtgttggtcttcgatattagtgatctctcatcttttgctgcgctgaaagattgggtttctcgcaccgacatcc

SEQ ID NO: 224 - DNA, 316 bp, Unknown Organism
  polynucleotide sequence that shows homology with sequences of unknown function
acccaaatcctcctcaacctgaacaatgttgaagagagccaacctctaccaggttgtagtttggttgcaaatgaaagaactcctatgaagctcctgtctgaaagtgaagtaatgcttgaaacacctgctcagcccacaccaaagagatcggtgccaattaccgaaaataagtacaagagtatgacatgccaaaactctgttgtttccaatctaattgtcaaaaggtcattggatttttccaccttgggtggtgaagagatatcttcagatttgagttctggcagtatagagcatcatgaagatgtagataatgccc

SEQ ID NO: 225 - DNA, 345 bp, Unknown Organism
  polynucleotide sequence that shows homology with sequences of unknown function
  misc_feature (11)..(11): n is a, c, g, or t
  misc_feature (17)..(17): n is a, c, g, or t
  misc_feature (26)..(26): n is a, c, g, or t
  misc_feature (42)..(42): n is a, c, g, or t
  misc_feature (54)..(54): n is a, c, g, or t
  misc_feature (65)..(65): n is a, c, g, or t
  misc_feature (70)..(70): n is a, c, g, or t
  misc_feature (90)..(90): n is a, c, g, or t
  misc_feature (106)..(106): n is a, c, g, or t
  misc_feature (112)..(112): n is a, c, g, or t
  misc_feature (130)..(130): n is a, c, g, or t
  misc_feature (137)..(137): n is a, c, g, or t
  misc_feature (210)..(210): n is a, c, g, or t
  misc_feature (225)..(225): n is a, c, g, or t
  misc_feature (247)..(247): n is a, c, g, or t
  misc_feature (250)..(250): n is a, c, g, or t
  misc_feature (256)..(256): n is a, c, g, or t
  misc_feature (271)..(271): n is a, c, g, or t
  misc_feature (275)..(275): n is a, c, g, or t
  misc_feature (277)..(277): n is a, c, g, or t
  misc_feature (286)..(286): n is a, c, g, or t
  misc_feature (292)..(292): n is a, c, g, or t
  misc_feature (296)..(296): n is a, c, g, or t
  misc_feature (317)..(317): n is a, c, g, or t
taccggatgantttgtngatgatgancattcccagtttttgnttgcacctgctnttttggccagntttcnattgagagagaggagacgcnaaaagcatgctgctgntttagngaaacaagatgatgaggnaaccgtnaagcttgaaaatgctgcccttgaacgctctaagtcagttgactctgctgagctggggaagtatagcatatggnggaaagagaatgaanatgagaatactgattcaaaggnacncttgangcgggaccaaatggntacngnaaggctgtntataancatngcaacaatgaagaaaaagatnggcttggctcaagagttagagaatcggc

SEQ ID NO: 226 - DNA, 456 bp, Unknown Organism
  polynucleotide sequence that shows homology with sequences of unknown function
  misc_feature (9)..(9): n is a, c, g, or t
  misc_feature (18)..(18): n is a, c, g, or t
  misc_feature (70)..(72): n is a, c, g, or t
tttcttgcntacaggatntcaaggcattgttcccctctgatagaaatcccttttatgctggttttggaannngagacaccgacaagctcagctacctcaaggttggaatacctgaaggaaaaatcttcaccatcgatccaaagggtcaaattcttatgaaccaccacatagatacaaaatcatacacctacatacatggttgcgtcgatgacatgtttccacccttgtcctcacgtgagcagatttgttatggacaaagtgttactattactaagaggaggtattttcgccgttgatgggtaaatgactggagagtgatgctactgatggattcatcgttgcgaatgacacacatactggaattgtgatgacctgcatttgaagaaaattctgtctctgaacctttagtaggggatatggtctctgtataactggttttgtcaagaaatgtccacc

SEQ ID NO: 227 - DNA, 76 bp, Unknown Organism
  polynucleotide sequence that shows homology with sequences of unknown function
  misc_feature (7)..(7): n is a, c, g, or t
  misc_feature (53)..(53): n is a, c, g, or t
  misc_feature (55)..(55): n is a, c, g, or t
  misc_feature (59)..(59): n is a, c, g, or t
  misc_feature (66)..(67): n is a, c, g, or t
  misc_feature (70)..(70): n is a, c, g, or t
  misc_feature (72)..(72): n is a, c, g, or t
tatcagncgaatctaattttgtacccggtggattgttatgtggtcctcaatgntnaagnaatatgnncgntnttgt

SEQ ID NO: 228 - DNA, 68 bp, Unknown Organism
  polynucleotide sequence that shows homology with sequences of unknown function
ttatggctttcactccaagaaaccctcgtgctggaaagccacctgatcattacatagaatacatgcgc

SEQ ID NO: 229 - DNA, 136 bp, Unknown Organism
  polynucleotide sequence that shows homology with sequences of unknown function
  misc_feature (14)..(14): n is a, c, g, or t
  misc_feature (47)..(47): n is a, c, g, or t
  misc_feature (56)..(56): n is a, c, g, or t
  misc_feature (63)..(64): n is a, c, g, or t
  misc_feature (81)..(81): n is a, c, g, or t
  misc_feature (93)..(94): n is a, c, g, or t
  misc_feature (120)..(120): n is a, c, g, or t
  misc_feature (132)..(132): n is a, c, g, or t
ctcctatacctganaggactctcactttggagcctcctctaggtatntaattccgncctttgnngggagactgacatcggntacatgcagcgnngcttcaactgtaaatattccaccttnatggccttgccntcgt

SEQ ID NO: 230 - DNA, 254 bp, Unknown Organism
  polynucleotide sequence that shows homology with sequences of unknown function
  misc_feature (13)..(13): n is a, c, g, or t
  misc_feature (142)..(142): n is a, c, g, or t
  misc_feature (150)..(150): n is a, c, g, or t
  misc_feature (154)..(154): n is a, c, g, or t
  misc_feature (158)..(158): n is a, c, g, or t
  misc_feature (160)..(160): n is a, c, g, or t
  misc_feature (165)..(166): n is a, c, g, or t
  misc_feature (168)..(168): n is a, c, g, or t
  misc_feature (175)..(175): n is a, c, g, or t
  misc_feature (177)..(177): n is a, c, g, or t
  misc_feature (180)..(180): n is a, c, g, or t
  misc_feature (186)..(186): n is a, c, g, or t
cacccagaaaatnatctataaagtattatgatccaggacgagctgactaaactagctgatgaggaagatgacgaggaagaggaaggcgatgctgagaaggatgtaaaaaagccttctggcaaaggtgtgaaggcctgaaaanacatgggnagantgtnancacannanaggcccncnacnctatcnatcaatatccaacctttctcttcctcgtgaatttgtgccttgtgagttcaaccagctgtaatctattc

SEQ ID NO: 231 - DNA, 204 bp, Unknown Organism
  polynucleotide sequence that shows homology with sequences of unknown function
  misc_feature (3)..(4): n is a, c, g, or t
  misc_feature (7)..(7): n is a, c, g, or t
  misc_feature (10)..(11): n is a, c, g, or t
  misc_feature (15)..(15): n is a, c, g, or t
  misc_feature (20)..(20): n is a, c, g, or t
  misc_feature (24)..(25): n is a, c, g, or t
  misc_feature (52)..(52): n is a, c, g, or t
  misc_feature (66)..(66): n is a, c, g, or t
  misc_feature (84)..(84): n is a, c, g, or t
  misc_feature (92)..(92): n is a, c, g, or t
  misc_feature (120)..(120): n is a, c, g, or t
  misc_feature (130)..(130): n is a, c, g, or t
  misc_feature (168)..(168): n is a, c, g, or t
  misc_feature (171)..(171): n is a, c, g, or t
gannccnttnncttnctaantaanngcaaaaataagcgacatggggtttatntggaagaagaagantgggactttgaataatangaagcgtnagtgggaggagaatagatcacggcggcngccatagctncagggaacactacatatttagctatcagcgccaccttnctnaccaatggctctcccttcatcaacgccatttgc

SEQ ID NO: 232 - DNA, 364 bp, Unknown Organism
  polynucleotide sequence that shows homology with sequences of unknown function
  misc_feature (8)..(8): n is a, c, g, or t
  misc_feature (16)..(16): n is a, c, g, or t
  misc_feature (19)..(19): n is a, c, g, or t
  misc_feature (145)..(145): n is a, c, g, or t
  misc_feature (156)..(156): n is a, c, g, or t
  misc_feature (177)..(177): n is a, c, g, or t
  misc_feature (192)..(192): n is a, c, g, or t
  misc_feature (211)..(211): n is a, c, g, or t
  misc_feature (228)..(229): n is a, c, g, or t
  misc_feature (231)..(231): n is a, c, g, or t
  misc_feature (235)..(237): n is a, c, g, or t
  misc_feature (239)..(239): n is a, c, g, or t
  misc_feature (245)..(245): n is a, c, g, or t
  misc_feature (252)..(252): n is a, c, g, or t
  misc_feature (255)..(256): n is a, c, g, or t
  misc_feature (258)..(258): n is a, c, g, or t
  misc_feature (279)..(279): n is a, c, g, or t
  misc_feature (362)..(362): n is a, c, g, or t
gccttgantttgcgcnccnaacaggatgatcttgtagatgatgatcattcccagtttttggatgcacctgcttttttggccagaaggcaattgagagagaggagacgcgaaaagcatgctgctgctttagtgaaacaagatgatnaggtaaccgtnaagcttgaaaatgctgccctngaacgctctaactangctggcttttttgtgctgnaccagaatcccttatgnngnacannnantgatantgagaantcnnantcaaaggtacgcttgatgcgngaccaaatggttacggcaaggctgtatataagcattgcaacaatgaagaaaaagattggcttggctcaagagttacagaatcngc

SEQ ID NO: 233 - DNA, 306 bp, Unknown Organism
  polynucleotide sequence that shows homology with sequences of unknown function
ttggacttgagtgcttgtagatggtgcctttgccgatacccacggcatccgcaatcatctcgacggtgacgctgtcttcaccctggtcgaggaacagcttgagtgcggtgtcgagaatttcctgctcgcggcggcgaaactcacggaccttgcggggttctttgtgcataagaaaaaggtctgcagaggtggatattgggagggtggcgtgccccaagccgtgcttgtcggaacgttttacccggtgcgcgggattatcccgactgaacggtcgttgggcaacgcctatatgaacaacctttgcac

SEQ ID NO: 234 - DNA, 303 bp, Unknown Organism
  polynucleotide sequence that shows homology with sequences of unknown function
tcaacctgaacaatgttgaagagagccaacctctaccaggttgtagtttggttgcaaatgaaagaactcctatgaagctcctgtctgaaagtgaagtaatgcttgaaacacctgctcagcccacaccaaagagatcggtgccaattaccgaaaataagtacaagagtatgacatgccaaaactctgttgtttccaatctaattgtcaaaaggtcattggatttttccaccttgggtggtgaagagatatcttcagatttgagttctggcagtatagagcatcatgaagatgtagataatgccc

SEQ ID NO: 235 - DNA, 259 bp, Unknown Organism
  polynucleotide sequence that shows homology with sequences of unknown function
tcatgtgcattttgactttggagactcaacacaggggttgggtctgtctaggacaggtgcacctgaaatgaaaagaccatcttgatgcatcctatgtgctacatgttgcatttattcaagggtaaaaaggtcatttggcggaccaatgatagttgagggcaagtgaaaaaatgaaaaaaatgaaaaaagggaaaaagagagggtgaagtgtgaggataaagcgagcggggcctaattaggttatctgttacatttttgt

SEQ ID NO: 236 - DNA, 239 bp, Unknown Organism
  polynucleotide sequence that shows homology with sequences of unknown function
  misc_feature (179)..(179): n is a, c, g, or t
  misc_feature (226)..(226): n is a, c, g, or t
tcacgtgcatctgactttggggactcaacacaggggttgggtccgtctaggacaggtgtacctaaaataacagaccatcttgatgcatcctatgtgctacatgttgcatttcttcaagggcaaaagggtcatttggcggaccaatgatagttgagggaaaatgaaaaagaaaagaaaangaggttgaagtgtaaagataaagcgagtggggcccgattatattttntgtcacattcttg

SEQ ID NO: 237 - DNA, 171 bp, Unknown Organism
  polynucleotide sequence that shows homology with sequences of unknown function
  misc_feature (6)..(6): n is a, c, g, or t
  misc_feature (9)..(9): n is a, c, g, or t
  misc_feature (14)..(14): n is a, c, g, or t
  misc_feature (28)..(28): n is a, c, g, or t
  misc_feature (40)..(40): n is a, c, g, or t
  misc_feature (59)..(59): n is a, c, g, or t
  misc_feature (69)..(69): n is a, c, g, or t
  misc_feature (74)..(74): n is a, c, g, or t
  misc_feature (87)..(87): n is a, c, g, or t
agcagncanggatnaaatgggaaaaacntgtcaagcctanctctaccaccaaaagagantgaaagatcngactngagcacaccactngatacataggtatcaggcacatagaagattagttactgtttgccaaccgaagaaattctttcactactgatggcaagcatacca

SEQ ID NO: 238 - DNA, 206 bp, Unknown Organism
  polynucleotide sequence that shows homology with sequences of unknown function
  misc_feature (156)..(156): n is a, c, g, or t
agaggtatccttctagtgtggattttgatactggggttgatgatttgacaaacccgaagtggtatgtggtgtggtctgcaaatatgaacactcacattcttcccgaatgcgtagttagctacaaatatggacgtcatatgtcaggtcaagcaaatngtgcttcatccatgaagtgggctcctcatgcttcaaatgcaatgggtaca

SEQ ID NO: 239 - DNA, 58 bp, Unknown Organism
  polynucleotide sequence that shows homology with sequences of unknown function
  misc_feature (4)..(4): n is a, c, g, or t
  misc_feature (34)..(34): n is a, c, g, or t
gagnggcaagtcctggcgctctatttccgagagnagaaaaaagaattttgtttttgct

SEQ ID NO: 240 - DNA, 139 bp, Unknown Organism
  polynucleotide sequence that shows homology with sequences of unknown function
  misc_feature (5)..(5): n is a, c, g, or t
  misc_feature (11)..(11): n is a, c, g, or t
  misc_feature (20)..(20): n is a, c, g, or t
  misc_feature (33)..(34): n is a, c, g, or t
  misc_feature (36)..(36): n is a, c, g, or t
gggtncaggcntctggcaantcctcggtgtcanngntacacaactggagatggaaagaaagtttatgtcgccaaaaatgggcaggagttttctggtcaaagcgcatatagatgttacagaaaggagactggagctggtt

SEQ ID NO: 241 - DNA, 202 bp, Unknown Organism
  polynucleotide sequence that shows homology with sequences of unknown function
  misc_feature (14)..(15): n is a, c, g, or t
  misc_feature (44)..(44): n is a, c, g, or t
ggttctatctaaannatttaatgacttgcagctgaaggatggtntgtacactagcaaagctgaactgcggaaacgtatcaggaaactcaaaaatgggccaggaagaaatcacactgcaggtgggagggttgaaaagtctaaaggtttttctcccaatagctttgatcgtgtgctccttgatgctccttgctctgcattaggt

SEQ ID NO: 242 - DNA, 387 bp, Unknown Organism
  polynucleotide sequence that shows homology with sequences of unknown function
  misc_feature (3)..(3): n is a, c, g, or t
  misc_feature (5)..(5): n is a, c, g, or t
  misc_feature (24)..(24): n is a, c, g, or t
  misc_feature (134)..(134): n is a, c, g, or t
tanantacgaccgagaacatcctnatcaaatgctctcaagctgttcttcatcaaaaccttttttcgggttcatcttcagtaccattacaacaatctttgattgaagctgcgggtaatgttgtacaacgggcttngaactcggcccagcccgaacatcagcccaatgtggtaaaaaatccgaaaaaacgaaccagggcatcaaggagagcgccaactactgtccttactactgacaccacaaattttcgacaaatggttcaagaattcactggcatccctacagctccgtttactggttcagcctacactcgccgccttgatcttttttctacagctggctcagcgatgaggtcgggtcatttggatactcttgggccactttaccct

SEQ ID NO: 243 - DNA, 286 bp, Unknown Organism
  polynucleotide sequence that shows homology with sequences of unknown function
  misc_feature (26)..(26): n is a, c, g, or t
aagacagggatggcagtgctgagagnagggcaaagattgagcaatggaatagggaaaaagaagaggcagaatctgctaaatacaataattttgacactgataatggcaagagtgatggtggtgatcactatggagaacagtttgatgacgattacccgaagcagcagtaggtagcaaatggaagttatggctactgatagtagtgttactctgggtggagtacaggtccactgtgctgtgattttgaaaaaagcataacccttctattgtcttctttttaccatgt

SEQ ID NO: 244 - DNA, 319 bp, Unknown Organism
  polynucleotide sequence that shows homology with sequences of unknown function
ggatcaggaagggcatgtggctgatgcaggaaaagaaacattgacatctgttcaaacatctgaaattgaagattggacaaaatacaaggatgatgatattatgcaacagcaatcttccatccaggctgaacaagctgtaaaaactcaatttgttggcgataaggaacctttgtcttcattagaagctgaataccatctgggaaattcaattttgctggagaaaataaaggtgctgagtgaacaatatgctgcccttagaagaacacgtggagatggaaattgctttttccgcagtttcatgtttggttaccttgtatgc

SEQ ID NO: 245 - DNA, 381 bp, Unknown Organism
  polynucleotide sequence that shows homology with sequences of unknown function
  misc_feature (4)..(4): n is a, c, g, or t
ccgncaaacaaagtaaaagatgcaggatcaggaagggcatgtggctgatgcaggaaaagaaacattgacatctgttcaaacatctgaaattgaagattggacaaaatacaaggatgatgatattatgcaacagcaatcttccatccaggctgaacaagctgtaaaaactcaatttgttggcgataaggaacctttgtcttcattagaagctgaataccatctgggaaattcaattttgctggagaaaataaaggtgctgagtgaacaatatgctgcccttagaagaacacgtggagatggaaattgctttttccgcagtttcatgtttggttaccttgagcacattctggaatcacaagaatcaaagcgaagttcatcgca

SEQ ID NO: 246 - DNA, 126 bp, Unknown Organism
  polynucleotide sequence that shows homology with sequences of unknown function
  misc_feature (17)..(17): n is a, c, g, or t
  misc_feature (20)..(20): n is a, c, g, or t
  misc_feature (35)..(36): n is a, c, g, or t
  misc_feature (46)..(46): n is a, c, g, or t
  misc_feature (55)..(55): n is a, c, g, or t
gcaaacctgaaagaaangantggcaatgatatttnntctgatggcnaaggtgaanccagagattactttggtggcgtgcgcaaaccaccaggtggagagagcagcattgcactagtttagatgatg

SEQ ID NO: 247 - DNA, 99 bp, Unknown Organism
  polynucleotide sequence that shows homology with sequences of unknown function
  misc_feature (46)..(46): n is a, c, g, or t
gaattttagatttcaatggctctcaatgagttacacggaatcaagntctaaagtacctttgcggatgcgagtttgctagaggctggtctctaatgttgg

SEQ ID NO: 248 - DNA, 134 bp, Unknown Organism
  polynucleotide sequence that shows homology with sequences of unknown function
cagggtgctttgtgacatatccctgcactgatcacccaggtgacctaactctggtctaagctctgcctaaaggggcattgtgacagatctctgcactgatcactcaggtgatgtaactattgtctaggctctgc

SEQ ID NO: 249 - DNA, 280 bp, Unknown Organism
  polynucleotide sequence that shows homology with sequences of unknown function
gaagagtggactctttatgagcaggtagctgttgcagctatggattgtcagtctcttgatgtggcaaaggactgcataaaggtattgcaaaagaagtttccagggagcaaaagggttggtaggctagaagctatgttgctagaggccagaggattgtggtcagaggcagaaaatgcttactcaagccttttggaggaaaatccctttgatcaggttgtacataagaggagggcagccatggcaaaggcgcaaggcaatacgtcagcagcaattgactggc

SEQ ID NO: 250 - DNA, 92 bp, Unknown Organism
  polynucleotide sequence that shows homology with sequences of unknown function
ttctgctggaaagtactatgatggtagatttgatgaaccccaacaacaatattttttggatgcttgtttcctttgtaagaaacgccttgcag

SEQ ID NO: 251 - DNA, 158 bp, Unknown Organism
  polynucleotide sequence that shows homology with sequences of unknown function
aaactaatatacgagttgtgtctgcatcttcctcaactggtttcatagattgatcaattgtggcaccggcaatgtggtggcgaggtttacatcctcgaattgttccaccggtcaaaagatgacctgcttttctgaaatgaattctgtttcccaagcag

SEQ ID NO: 252 - DNA, 162 bp, Unknown Organism
  polynucleotide sequence that shows homology with sequences of unknown function
  misc_feature (15)..(15): n is a, c, g, or t
  misc_feature (17)..(18): n is a, c, g, or t
  misc_feature (24)..(24): n is a, c, g, or t
  misc_feature (27)..(27): n is a, c, g, or t
  misc_feature (31)..(31): n is a, c, g, or t
  misc_feature (36)..(36): n is a, c, g, or t
  misc_feature (42)..(42): n is a, c, g, or t
  misc_feature (53)..(53): n is a, c, g, or t
gcacatttgagagcncnngcgcantgncatntcttnagcagnggaagagtaanttctagatgtaaataccctgctttcccgtaagaactggtttatattgaaagcagaaatgcctctgctggccaattttcgacttataattccagacatatccacttcctc

SEQ ID NO: 253 - DNA, 278 bp, Unknown Organism
  polynucleotide sequence that shows homology with sequences of unknown function
  misc_feature (84)..(84): n is a, c, g, or t
  misc_feature (160)..(160): n is a, c, g, or t
  misc_feature (197)..(197): n is a, c, g, or t
  misc_feature (213)..(213): n is a, c, g, or t
agcaagtgaaggattggtttctgttcatggtgacgctgtgaagagaatatgatgagtctaaatcaggagtgaggcattctcaanttcattgctcagggagcagaagttgatatgtagattgctactatttgcaagagcactttcctggcatgttagtcanagtcatgttttttgttcctgatcagcagtcttctttnactatctgccctttgnaagagttagccatacgttagagcaatgtgttcttttcaatgttggatatttatttgaacttgatc

SEQ ID NO: 254 - DNA, 301 bp, Unknown Organism
  polynucleotide sequence that shows homology with sequences of unknown function
  misc_feature (5)..(5): n is a, c, g, or t
  misc_feature (29)..(29): n is a, c, g, or t
  misc_feature (56)..(56): n is a, c, g, or t
  misc_feature (156)..(156): n is a, c, g, or t
  misc_feature (162)..(162): n is a, c, g, or t
  misc_feature (171)..(171): n is a, c, g, or t
  misc_feature (173)..(173): n is a, c, g, or t
  misc_feature (180)..(180): n is a, c, g, or t
  misc_feature (187)..(187): n is a, c, g, or t
  misc_feature (207)..(207): n is a, c, g, or t
  misc_feature (214)..(214): n is a, c, g, or t
  misc_feature (217)..(217): n is a, c, g, or t
  misc_feature (225)..(225): n is a, c, g, or t
  misc_feature (229)..(230): n is a, c, g, or t
  misc_feature (239)..(239): n is a, c, g, or t
  misc_feature (241)..(241): n is a, c, g, or t
  misc_feature (245)..(245): n is a, c, g, or t
  misc_feature (248)..(249): n is a, c, g, or t
  misc_feature (262)..(262): n is a, c, g, or t
  misc_feature (264)..(264): n is a, c, g, or t
  misc_feature (266)..(266): n is a, c, g, or t
  misc_feature (273)..(273): n is a, c, g, or t
  misc_feature (299)..(299): n is a, c, g, or t
agtangcgtagggaagacagggatggcantgctgagaggagggcaaagattgagcnatggaatagggaaaaagaagaggcagaatctgctaaatacaataattttgacactgataatggcaagagtgatggtggtgatcactatggagaacagctngatgangattacccnangcagcantaggtancaagatggaagttatggctnctgatantancgttactntggnnggagtacangnccantgnnctgcagattttgnananagcatancccttctattggattctttttaccangt

SEQ ID NO: 255 - DNA, 411 bp, Unknown Organism
  polynucleotide sequence that shows homology with sequences of unknown function
  misc_feature (65)..(65): n is a, c, g, or t
  misc_feature (264)..(264): n is a, c, g, or t
  misc_feature (308)..(308): n is a, c, g, or t
  misc_feature (312)..(312): n is a, c, g, or t
  misc_feature (316)..(316): n is a, c, g, or t
  misc_feature (323)..(323): n is a, c, g, or t
  misc_feature (331)..(331): n is a, c, g, or t
  misc_feature (336)..(336): n is a, c, g, or t
  misc_feature (338)..(338): n is a, c, g, or t
  misc_feature (342)..(342): n is a, c, g, or t
  misc_feature (398)..(398): n is a, c, g, or t
aagctaacagaatcgtttgtggaataagggtgtcgattccgagagcttccacccccgttatcggnctcatgaaatgcgactaagactaagtaatggagaatccgataaacctttgatagtccatgttggacgacttggagttgagaagagtttggatttcctcaaaagggtcatggatagacttccagatgctcgcattgcttttattggagatgggccatacagggaggaattggagaaaatgttccatggcatgcctgccgngttcacaggtatgttactaggagaggagctttcccaagcatatnccancggngatgttnttcttatnccttnanagtnagagacactggggctcgtcgctttggaggccatgtcatcagggcttcctgtagtanctgcccgtgccgg

SEQ ID NO: 256 - DNA, 168 bp, Unknown Organism
  polynucleotide sequence that shows homology with sequences of unknown function
  misc_feature (3)..(3): n is a, c, g, or t
  misc_feature (7)..(7): n is a, c, g, or t
  misc_feature (9)..(9): n is a, c, g, or t
  misc_feature (15)..(15): n is a, c, g, or t
  misc_feature (17)..(17): n is a, c, g, or t
  misc_feature (25)..(26): n is a, c, g, or t
  misc_feature (28)..(28): n is a, c, g, or t
  misc_feature (32)..(32): n is a, c, g, or t
  misc_feature (35)..(35): n is a, c, g, or t
  misc_feature (50)..(51): n is a, c, g, or t
  misc_feature (55)..(55): n is a, c, g, or t
  misc_feature (58)..(58): n is a, c, g, or t
  misc_feature (70)..(70): n is a, c, g, or t
  misc_feature (142)..(142): n is a, c, g, or t
  misc_feature (145)..(145): n is a, c, g, or t
  misc_feature (150)..(150): n is a, c, g, or t
  misc_feature (156)..(156): n is a, c, g, or t
cgntttntnctcggngngtcagctnngnggangcnctgggtgctggttcnnaggnctnatgaaacgctcnaaggcaacaatctggttatgacaactgcgggaaaaattccctttctgcgcaaactctcaaagcgatggactngcnatcanagcaanttttgcatctgc

SEQ ID NO: 257 - DNA, 191 bp, Unknown Organism
  polynucleotide sequence that shows homology with sequences of unknown function
  misc_feature (5)..(5): n is a, c, g, or t
  misc_feature (8)..(8): n is a, c, g, or t
atgangangaggatgaagaagattataagccaccacctaggaagcaatctgataattctgatgaagatgcggagtcttttccgttgaaacgaaagctatctccgaaagaagagcctgagccaaaaaggttgcagcggattgctaaaggctcaaagtctcgagacggtgttttcgctgctttgtgctcaacc

SEQ ID NO: 258 - DNA, 528 bp, Unknown Organism
  polynucleotide sequence that shows homology with sequences of unknown function
  misc_feature (495)..(495): n is a, c, g, or t
atgatcaagccctagaattcgcgaagatgctcgatcaatcgggaactgtaattgttttgggaaatatcgtattcctgaagcctgaccaggtggtgaaagccatgaaaggcctaatgccaatgcccttggccgaaccaaatgacccaaaaatgatgaaggagcttcaacaaatggaggagaagaaagcagcaattgacaagaaggcagaatcattggtgcggacagagttgtggcgtggactaggttactttgtgattcagacttcagctttcatgaggctcactttctgggagttatcatgggatgtaatggagcctatttgcttctatgtcacatccatttactgcatggctgggtatgctttcttccttaggacctccaaagaaccttcttttgaagggtttttccagagccggtttagtgcaaagcaaaagcgattgatgaagcttcataaatttggatcttcatagggaccaagagctccacagagcttgngatcctcattcgacgatacctggtggaaacacc

SEQ ID NO: 259 - DNA, 84 bp, Unknown Organism
  polynucleotide sequence that shows homology with sequences of unknown function
  misc_feature (51)..(51): n is a, c, g, or t
cagatggtactgtaaacatgtatgttcatcatgagattattattcctgcgnttcctgtctgcacagcatggatcgattgcccta

SEQ ID NO: 260 - DNA, 112 bp, Unknown Organism
  polynucleotide sequence that shows homology with sequences of unknown function
  misc_feature (4)..(4): n is a, c, g, or t
  misc_feature (11)..(11): n is a, c, g, or t
  misc_feature (19)..(19): n is a, c, g, or t
  misc_feature (29)..(29): n is a, c, g, or t
  misc_feature (42)..(42): n is a, c, g, or t
  misc_feature (46)..(46): n is a, c, g, or t
  misc_feature (59)..(59): n is a, c, g, or t
ttgnttactcngcccttgnatttcaatgngctaatccattancccncacggaatgacgntctaaagtacctttgcggatgcgagtttgctagaggctggtctctaatgatgg

SEQ ID NO: 261 - DNA, 265 bp, Unknown Organism
  polynucleotide sequence that shows homology with sequences of unknown function
  misc_feature (7)..(7): n is a, c, g, or t
caataantttatttggaggctttccttccctgcctggtttgatgtcaatgacctatctgaaaatgctattgatgatgatgagggtttagatgcttcagcagcatatgtggcgagtttgttggctacggagccccctcacatcaaacttggggttggaggcttcagcatgggcgcagcgacatctctttattctgcaacttgtttcactcgtgggaagtatgagaatggcaactcgtactctgccaatctgagtgcagctgttgga

SEQ ID NO: 262 - DNA, 90 bp, Unknown Organism
  polynucleotide sequence that shows homology with sequences of unknown function
  misc_feature (11)..(11): n is a, c, g, or t
  misc_feature (32)..(32): n is a, c, g, or t
  misc_feature (38)..(39): n is a, c, g, or t
  misc_feature (57)..(57): n is a, c, g, or t
  misc_feature (67)..(67): n is a, c, g, or t
  misc_feature (85)..(85): n is a, c, g, or t
ggatcaggttntagcagatacactataatcanagttgnngtggtcatggggcatggntatatttggnggaaggggtggaagcttnccgaa

SEQ ID NO: 263 - DNA, 191 bp, Unknown Organism
  polynucleotide sequence that shows homology with sequences of unknown function
  misc_feature (106)..(106): n is a, c, g, or t
gtgtcccagcaaggattacccaggtgatgtacctctcatcaaggctctgcctacaggcacattgtgatgtatctctgcactgatcacctaggtcatgtaacttttntctaggctctacctacgatggcattgtgacatatctctgcactaatcatccaagtgatgtaactcttgtctaggatgtgcctaaa

SEQ ID NO: 264 - DNA, 249 bp, Unknown Organism
  polynucleotide sequence that shows homology with sequences of unknown function
  misc_feature (4)..(4): n is a, c, g, or t
  misc_feature (16)..(16): n is a, c, g, or t
  misc_feature (23)..(23): n is a, c, g, or t
  misc_feature (30)..(30): n is a, c, g, or t
  misc_feature (61)..(61): n is a, c, g, or t
  misc_feature (73)..(73): n is a, c, g, or t
  misc_feature (113)..(113): n is a, c, g, or t
  misc_feature (124)..(124): n is a, c, g, or t
  misc_feature (140)..(141): n is a, c, g, or t
  misc_feature (147)..(147): n is a, c, g, or t
  misc_feature (152)..(152): n is a, c, g, or t
  misc_feature (157)..(157): n is a, c, g, or t
  misc_feature (160)..(160): n is a, c, g, or t
  misc_feature (171)..(171): n is a, c, g, or t
  misc_feature (207)..(209): n is a, c, g, or t
  misc_feature (225)..(225): n is a, c, g, or t
ccgntactctccgctngaccagntcgtttncttcccctttttcaggctggtgacacactantacagtcagtangacaacttcatcactgattttgagacaaagatcaatcttntcaagcttgcncattttgcggtcattnnttctcnggaanacccnganaaagaggctgntataggttaccttgaaggagagactgagaaacttcnnnatactaaggagacacngataaaggagccgattctttatat

SEQ ID NO: 265 - DNA, 287 bp, Unknown Organism
  polynucleotide sequence that shows homology with sequences of unknown function
  misc_feature (89)..(89): n is a, c, g, or t
ggctgttagtggctcaaaaattgttggctcagccaaagcagaatccattgaaagtggtgaaaggactcgtcacatgcagcctacacttncgaatagtccacacccttctctttcttgcaatgctgttgtatattctgcatatgaagcatccaaggacgaagtaacccaaaataatgcaccagctactgatgattgtggattcttcgagtcaggctatatgcttgcgaacgggacagggcctcctattggagaaagcaactatgacgaagctgttgaatttgatccaa

SEQ ID NO: 266 - DNA, 281 bp, Unknown Organism
  polynucleotide sequence that shows homology with sequences of unknown function
  misc_feature (96)..(96): n is a, c, g, or t
  misc_feature (254)..(254): n is a, c, g, or t
acaaatggttacagatgttatggaaaatcttgtcaagagggctataatggctgaatctgaaactgctttagagaaggagaaggtaacaataggtcntgaagagattcaaagaaaggcgcttcagattgaaaacatgtcaggtaagttagaagagatggaaaggtttgctttgggtacaaattgtatcttgaatgagatgcgccagagagttgaagatttggtcgaagaaacttctagacagaggcagcgagctncagaaaatgagcaggagctttctcgtg

SEQ ID NO: 267 - DNA, 282 bp, Unknown Organism
  polynucleotide sequence that shows homology with sequences of unknown function
  misc_feature (2)..(3): n is a, c, g, or t
  misc_feature (5)..(5): n is a, c, g, or t
  misc_feature (10)..(10): n is a, c, g, or t
  misc_feature (15)..(15): n is a, c, g, or t
  misc_feature (20)..(20): n is a, c, g, or t
  misc_feature (30)..(30): n is a, c, g, or t
  misc_feature (32)..(32): n is a, c, g, or t
  misc_feature (41)..(42): n is a, c, g, or t
  misc_feature (48)..(49): n is a, c, g, or t
  misc_feature (51)..(51): n is a, c, g, or t
  misc_feature (55)..(55): n is a, c, g, or t
  misc_feature (59)..(60): n is a, c, g, or t
  misc_feature (65)..(66): n is a, c, g, or t
  misc_feature (68)..(68): n is a, c, g, or t
  misc_feature (72)..(72): n is a, c, g, or t
  misc_feature (74)..(75): n is a, c, g, or t
  misc_feature (81)..(81): n is a, c, g, or t
  misc_feature (85)..(86): n is a, c, g, or t
  misc_feature (93)..(93): n is a, c, g, or t
  misc_feature (95)..(95): n is a, c, g, or t
  misc_feature (109)..(110): n is a, c, g, or t
  misc_feature (123)..(123): n is a, c, g, or t
  misc_feature (129)..(129): n is a, c, g, or t
  misc_feature (131)..(131): n is a, c, g, or t
  misc_feature (135)..(136): n is a, c, g, or t
  misc_feature (138)..(138): n is a, c, g, or t
  misc_feature (140)..(140): n is a, c, g, or t
  misc_feature (144)..(144): n is a, c, g, or t
  misc_feature (148)..(150): n is a, c, g, or t
  misc_feature (156)..(157): n is a, c, g, or t
  misc_feature (159)..(159): n is a, c, g, or t
  misc_feature (161)..(161): n is a, c, g, or t
  misc_feature (164)..(164): n is a, c, g, or t
  misc_feature (170)..(170): n is a, c, g, or t
  misc_feature (174)..(174): n is a, c, g, or t
  misc_feature (177)..(177): n is a, c, g, or t
  misc_feature (179)..(179): n is a, c, g, or t
  misc_feature (191)..(191): n is a, c, g, or t
  misc_feature (196)..(196): n is a, c, g, or t
  misc_feature (227)..(227): n is a, c, g, or t
gnntntggangctgnacatntcatcctcancncaggcctanncttagnncnaggngccnnccatnntncagntnnctcttnccgnnattctantnattcgtgcacatgnngaaacctatgctnttgcgncngctnnangnacantcannnctgcanngncnganccttcntgcncancntaatcaaccttncaacngcatgatgactcttcatgcatagccatatgntatcttcattacgggctttttcagacataccgcttcgttagcaggcatcttaccc

SEQ ID NO: 268 - DNA, 119 bp, Unknown Organism
  polynucleotide sequence that shows homology with sequences of unknown function
  misc_feature (87)..(87): n is a, c, g, or t
gatattcgtagggcgaggactgttatcttacaaaggatcatcaaacccccaaaccactaaagtgctgaaatttgccttagcagcagngaacatttatctgcttttcatagtttgtgatg

SEQ ID NO: 269 - DNA, 314 bp, Unknown Organism
  polynucleotide sequence that shows homology with sequences of unknown function
gggtcaatactctgtcttcactgcgatcgatatttcgcgaatgttgcggtgagggacgagcatttcaagacgaaaaagcacaggaagcgtgtgaaaataatgatgggccctgcaccacacacccaacttgatgctgatttagctgctggaattggcatgccagataatggtccaaagctaatgtcgatgagttgagcttctttcgtcctgtttataactcctacattactggtagagttcttttgaactttgagaatttgtctgaggaacataggtttttgttagtctaccatctctctctcagtatagcaagt

SEQ ID NO: 270 - DNA, 411 bp, Unknown Organism
  polynucleotide sequence that shows homology with sequences of unknown function
  misc_feature (12)..(13): n is a, c, g, or t
  misc_feature (15)..(15): n is a, c, g, or t
  misc_feature (20)..(20): n is a, c, g, or t
  misc_feature (28)..(28): n is a, c, g, or t
  misc_feature (81)..(81): n is a, c, g, or t
  misc_feature (274)..(274): n is a, c, g, or t
tgatgacctttnngnatctngtaatatntgagaacaatccaaacgttgagagctgcagcaattgatcaagttaccctcttngaagaacagaagatattagctacagaacaagcacagatggtgaagaagcttggtgattcagaaacgaagactgcaatgctcaagtcacaggctgaaagtttagcaaattactgtgatgatgtggccagcactaataaaacacgagcgctgcagaagggagtctgcaagtatagttcctattttttgatacagntggtattgctggttatcgtctttggactgtatgttttgcagatgtcacctgatgctgttgaagttgtaccgacataattttgagaagtgagcctttttcctttttcttgtattttcaacataaagcaacgatgaacg

SEQ ID NO: 271 - DNA, 131 bp, Unknown Organism
  polynucleotide sequence that shows homology with sequences of unknown function
  misc_feature (73)..(73): n is a, c, g, or t
agggttattcgggtcggacctggcgaatgcaattgctaaagatacaacaatttttgatcgaggtttagatacncatttgagacctaccattgattgtcttaggaaaactttgggcaccgatgaaaatgtag

SEQ ID NO: 272 - DNA, 124 bp, Unknown Organism
  polynucleotide sequence that shows homology with sequences of unknown function
  misc_feature (9)..(9): n is a, c, g, or t
  misc_feature (13)..(13): n is a, c, g, or t
  misc_feature (15)..(15): n is a, c, g, or t
  misc_feature (26)..(26): n is a, c, g, or t
  misc_feature (30)..(30): n is a, c, g, or t
cactcaaantccngncagaatccggngaanttttcggcgagacattccagtagagttcttgtccgaggttttgacatttcagattcatcgaggtctatttcttccttcctcacgttgtttgtgc

SEQ ID NO: 273 - DNA, 304 bp, Unknown Organism
  polynucleotide sequence that shows homology with sequences of unknown function
  misc_feature (28)..(29): n is a, c, g, or t
  misc_feature (32)..(32): n is a, c, g, or t
  misc_feature (87)..(87): n is a, c, g, or t
attggccggtcttggacttcaaaaaacnntcncagagcttcgaagtatcacttctaaacctcaatcggagaagaaaaaatataacanagttgactatttctctactcctttgcgccgttccgatcgattgaaaggcaacacccctcccgaatcagaattgcgccgttcgggtcgcttgaatgagaagtcctgctactctgctccaccagcaaaaaggaaattggggctttttgaagaaggagatgttgaagaagataatgagaagagacctgctaatgcacctctcctgagagtgaaagatggc

SEQ ID NO: 274 - DNA, 342 bp, Unknown Organism
  polynucleotide sequence that shows homology with sequences of unknown function
  misc_feature (4)..(4): n is a, c, g, or t
  misc_feature (11)..(12): n is a, c, g, or t
  misc_feature (209)..(209): n is a, c, g, or t
gccngctgtgnnctgcagttgttgtaaaggttgaagtagctctagacaaaagcatttgcatgttgaccagatgagcagaactgatgttatttgcagtagaaggaggaggtttcttctcgtcttcagcttctggatatagtaagggcctgacccttctactcttgggtcagaagaacgaagagaagcccatgagagttgcaccgtggaancagtaccagttggtggaccaagaaactgatccggacctccagctggcttccgggaagaacagggttgtccgcgggtgcgcctcctttgtatgctttggtcgcgctgccgctggacttgagagcccatctcccc

SEQ ID NO: 275 - DNA, 225 bp, Unknown Organism
  polynucleotide sequence that shows homology with sequences of unknown function
  misc_feature (7)..(7): n is a, c, g, or t
  misc_feature (14)..(14): n is a, c, g, or t
  misc_feature (157)..(157): n is a, c, g, or t
  misc_feature (221)..(221): n is a, c, g, or t
cgttctnctggatngttcctggctatattatgggaggggaaaacaggaacaaagagaaagcaagattgcgaaaaggtatatctattcttgttgcaactcctggacgtcttttggatcacctaaaaaacacatcatcattcttgtacacgaacctgcnctggataatttttgatgaagcagacagaattctggaacttggatatggtaaagagattgaaganatac

SEQ ID NO: 276 - DNA, 239 bp, Unknown Organism
  polynucleotide sequence that shows homology with sequences of unknown function
tccaggatgatggcactcctgtctcaatatttgcacttacggggagtaatgcaaacgatggacatttagctgctggccgaaatggagtcaagcgacttcgcactgttaggcatccaaatattttgtcatttcttcacagcaccgaagcagaaaattttgatggttctactaccaaggttaccatctatattgttactgaacctgtcatgccactctcggagaagctaaaggaattagga

SEQ ID NO: 277 - DNA, 273 bp, Unknown Organism
  polynucleotide sequence that shows homology with sequences of unknown function
  misc_feature (4)..(4): n is a, c, g, or t
  misc_feature (20)..(20): n is a, c, g, or t
  misc_feature (58)..(58): n is a, c, g, or t
  misc_feature (69)..(69): n is a, c, g, or t
  misc_feature (73)..(73): n is a, c, g, or t
  misc_feature (76)..(76): n is a, c, g, or t
  misc_feature (117)..(118): n is a, c, g, or t
  misc_feature (128)..(128): n is a, c, g, or t
atgngcaaatttgcgatccnagcgtcagatgaatccattacccaggagattgcttcanattttcagggntggntgnatgatctaactgatggtggtgttgagtacatgcctgaagannaagtaaaggnggctgctgctgaaaagctaaagatttcaatggaacggatagcattactaaaggcggcaagacctccccgaagtctccaaaatctgatgatgaagaagaagaggaggaagacgaggatgatgagaaccaaaagaaagaagacatga

SEQ ID NO: 278 - DNA, 283 bp, Unknown Organism
  polynucleotide sequence that shows homology with sequences of unknown function
  misc_feature (127)..(127): n is a, c, g, or t
ttgtctaagataaaaaatgtaatagtaaagagagctgcagatgaagacatggaaactgcttctatgttgcttaggtgttgctataatttttataaggacactttttgtgcattgctcccatcaggtntaaacctttatatggtgccatctcaatttgctacagaaacatatatccaacctgggatagatgcagttgacatactcgatatgaacacttcacggaagctacttttgtgggcctacacacttctgcatggccattgcacaaatgtctcagctgcta

SEQ ID NO: 279 - DNA, 173 bp, Unknown Organism
  polynucleotide sequence that shows homology with sequences of unknown function
  misc_feature (28)..(28): n is a, c, g, or t
  misc_feature (35)..(35): n is a, c, g, or t
  misc_feature (53)..(53): n is a, c, g, or t
  misc_feature (102)..(102): n is a, c, g, or t
  misc_feature (111)..(111): n is a, c, g, or t
  misc_feature (119)..(119): n is a, c, g, or t
  misc_feature (127)..(127): n is a, c, g, or t
  misc_feature (151)..(151): n is a, c, g, or t
gctttcttgcctgccgtagacacagtgngaagggngagtgcctacatgaatgntttagagtgaaccctgatggtgtcaaagacaaaattagctgtggtgagnttctggatntgactctngaggatgncgataaatgcatagagcttatttntacgccgatccgcaaagatgca

SEQ ID NO: 280 - DNA, 346 bp, Unknown Organism
  polynucleotide sequence that shows homology with sequences of unknown function
  misc_feature (49)..(49): n is a, c, g, or t
gcgatacgaggcgaaaaaactaagcttccggagagtgtgaaagcagatncccttactaatgaagcttttcttgaccgggggtttactcgccccaaggttctgatcattctccctctagcaagtgttgcatttcgagtagtcaagcggctgattgatttgacacctcctaaatacaagtctaatgtagaggagcgtgaacgtttctatagagaattcggggccggagtaagcaaagatagggaggatgaagatgccgtcgaaagctctgaatcaaagaagagctcaaaaccatctgattttcaagcattatttgggggaaataacaatgatcacttcatgctaggaa

SEQ ID NO: 281 - DNA, 45 bp, Unknown Organism
  polynucleotide sequence that shows homology with sequences of unknown function
  misc_feature (22)..(22): n is a, c, g, or t
gcggcatgtgaaaatcaactgnttgtgatatcccacctactggac

SEQ ID NO: 282 - DNA, 228 bp, Unknown Organism
  polynucleotide sequence that shows homology with sequences of unknown function
  misc_feature (2)..(2): n is a, c, g, or t
  misc_feature (11)..(11): n is a, c, g, or t
  misc_feature (31)..(31): n is a, c, g, or t
  misc_feature (33)..(33): n is a, c, g, or t
  misc_feature (39)..(40): n is a, c, g, or t
  misc_feature (60)..(60): n is a, c, g, or t
  misc_feature (93)..(93): n is a, c, g, or t
  misc_feature (98)..(98): n is a, c, g, or t
  misc_feature (102)..(102): n is a, c, g, or t
  misc_feature (105)..(105): n is a, c, g, or t
  misc_feature (109)..(109): n is a, c, g, or t
  misc_feature (169)..(169): n is a, c, g, or t
  misc_feature (176)..(176): n is a, c, g, or t
  misc_feature (185)..(185): n is a, c, g, or t
gngtacggggnccgggcatagatatgcctgnanggagtnngacaaagcttgcagagtggntcatccttgtcagaccacccctgcatgtatatnttctnttgnttncctntcccagtacaaagatggaccttactccagacagcgtatggtggtaacggatagctaattnagtgcanaggtgttgncctcctcttacttatacctttcagcagtcccccattatcgtgg

SEQ ID NO: 283 - DNA, 264 bp, Unknown Organism
  polynucleotide sequence that shows homology with sequences of unknown function
  misc_feature (4)..(4): n is a, c, g, or t
  misc_feature (8)..(8): n is a, c, g, or t
  misc_feature (19)..(19): n is a, c, g, or t
  misc_feature (21)..(22): n is a, c, g, or t
  misc_feature (25)..(25): n is a, c, g, or t
  misc_feature (31)..(31): n is a, c, g, or t
  misc_feature (45)..(45): n is a, c, g, or t
  misc_feature (101)..(101): n is a, c, g, or t
  misc_feature (123)..(123): n is a, c, g, or t
  misc_feature (127)..(127): n is a, c, g, or t
  misc_feature (192)..(192): n is a, c, g, or t
gctnactnacataataatnannccngaaaantaaaacttcttttnaattataatcataagctctactcggagatgtgaacagcgagttttaggtggacttntgaaagaatgcctcgattcgtngtgntccagaaggaagcggcttctctgttgataatcgaggacgattttgaaccttaggagaaggatcanacggctgtgaaggcacgggaagcgagtcgagaaggaaatcgttcgtaggttgatgccttttcacagcaactc

SEQ ID NO: 284 - DNA, 63 bp, Unknown Organism
  polynucleotide sequence showing no homology to known genes
ggccatcggagcaaaagagagcaacttacattcttgaactacgtgaagaatcttcagaaccct

SEQ ID NO: 285 - DNA, 57 bp, Unknown Organism
  polynucleotide sequence showing no homology to known genes
  misc_feature (19)..(19): n is a, c, g, or t
  misc_feature (38)..(38): n is a, c, g, or t
  misc_feature (40)..(40): n is a, c, g, or t
gaaggtgaaaatggatatngcgatatctcaaaggcacntnaggtatggcactttgtt

SEQ ID NO: 286 - DNA, 67 bp, Unknown Organism
  polynucleotide sequence showing no homology to known genes
  misc_feature (4)..(4): n is a, c, g, or t
ctgntcgaatgggatatgcatattcatatgtcctattgtactaatcagagtttcaagattctggctt

SEQ ID NO: 287 - DNA, 81 bp, Unknown Organism
  polynucleotide sequence showing no homology to known genes
  misc_feature (10)..(10): n is a, c, g, or t
  misc_feature (14)..(14): n is a, c, g, or t
  misc_feature (16)..(16): n is a, c, g, or t
  misc_feature (22)..(22): n is a, c, g, or t
  misc_feature (27)..(27): n is a, c, g, or t
  misc_feature (29)..(30): n is a, c, g, or t
  misc_feature (37)..(37): n is a, c, g, or t
  misc_feature (52)..(52): n is a, c, g, or t
tggataggtnagcnangagcanacgananncctgacngggaaagggatgcantcagactctcactggcttcagcaattctt

SEQ ID NO: 288 - DNA, 92 bp, Unknown Organism
  polynucleotide sequence showing no homology to known genes
  misc_feature (9)..(9): n is a, c, g, or t
  misc_feature (11)..(13): n is a, c, g, or t
  misc_feature (16)..(17): n is a, c, g, or t
  misc_feature (20)..(21): n is a, c, g, or t
  misc_feature (24)..(24): n is a, c, g, or t
  misc_feature (34)..(34): n is a, c, g, or t
  misc_feature (85)..(85): n is a, c, g, or t
ttgaaatancnnntgnnaannctnacattagccnctctgttgtgaggaaaggcctattccccctctctatgtacttcatttctgncatacat

SEQ ID NO: 289 - DNA, 224 bp, Unknown Organism
  polynucleotide sequence showing no homology to known genes
  misc_feature (5)..(6): n is a, c, g, or t
  misc_feature (14)..(14): n is a, c, g, or t
  misc_feature (48)..(48): n is a, c, g, or t
  misc_feature (54)..(54): n is a, c, g, or t
  misc_feature (67)..(67): n is a, c, g, or t
  misc_feature (75)..(75): n is a, c, g, or t
  misc_feature (182)..(182): n is a, c, g, or t
  misc_feature (211)..(211): n is a, c, g, or t
tgatnnatgctctntaattgccatactcattggtaattgtgttgatgngccttnataacgggttatnatggcctnctctcttctattagcgccaaatgtaggaaagtcattagtttgtgtttagttcaggaacagacatatttcagccgtgccaccggacatcgcatgatgtcaaactctgngaactaatctcactagagacgagaagacnatggcccgctagt

SEQ ID NO: 290 - DNA, 100 bp, Unknown Organism
  polynucleotide sequence showing no homology to known genes
  misc_feature (12)..(12): n is a, c, g, or t
gcagcagaaganatgaaccgaaatgaaggcctgagttcggccccaaacagccgattcaacaacagaaatcaatgcacagattcaatctcgagcagaatgt

SEQ ID NO: 291 - DNA, 128 bp, Unknown Organism
  polynucleotide sequence showing no homology to known genes
  misc_feature (8)..(8): n is a, c, g, or t
  misc_feature (21)..(21): n is a, c, g, or t
  misc_feature (45)..(45): n is a, c, g, or t
  misc_feature (55)..(55): n is a, c, g, or t
  misc_feature (63)..(63): n is a, c, g, or t
  misc_feature (70)..(70): n is a, c, g, or t
  misc_feature (100)..(100): n is a, c, g, or t
  misc_feature (108)..(108): n is a, c, g, or t
  misc_feature (113)..(113): n is a, c, g, or t
ggcatganaggaacattcacncgtatgagcacgcatgttgcagantctccttcgnggggctgntccaaanattcaccactatgttagcccaggaaattcncctccccntgatncttctgctctgcagt

SEQ ID NO: 292 - DNA, 142 bp, Unknown Organism
  polynucleotide sequence showing no homology to known genes
  misc_feature (1)..(1): n is a, c, g, or t
  misc_feature (15)..(15): n is a, c, g, or t
  misc_feature (17)..(17): n is a, c, g, or t
  misc_feature (19)..(20): n is a, c, g, or t
  misc_feature (43)..(43): n is a, c, g, or t
  misc_feature (53)..(57): n is a, c, g, or t
  misc_feature (86)..(86): n is a, c, g, or t
  misc_feature (95)..(95): n is a, c, g, or t
  misc_feature (106)..(106): n is a, c, g, or t
  misc_feature (123)..(123): n is a, c, g, or t
ntctgtgccggctcnantnnggatactacagccgaaaccctancgagcgtatnnnnnaagtgcgcaagagattgacagattgtaangctgttacngagaatgctgngtagggaagtccataangaccgcgtgattactatgt

SEQ ID NO: 293 - DNA, 77 bp, Unknown Organism
  polynucleotide sequence showing no homology to known genes
  misc_feature (1)..(1): n is a, c, g, or t
nggagtagtaatacccgtgtggatagtaccaaactcaattactttaggagggtatgttgctcaacctaccaactggc

SEQ ID NO: 294 - DNA, 83 bp, Unknown Organism
  polynucleotide sequence showing no homology to known genes
  misc_feature (5)..(5): n is a, c, g, or t
  misc_feature (8)..(8): n is a, c, g, or t
  misc_feature (18)..(18): n is a, c, g, or t
  misc_feature (24)..(26): n is a, c, g, or t
  misc_feature (29)..(29): n is a, c, g, or t
  misc_feature (38)..(39): n is a, c, g, or t
  misc_feature (46)..(49): n is a, c, g, or t
  misc_feature (54)..(54): n is a, c, g, or t
  misc_feature (70)..(70): n is a, c, g, or t
  misc_feature (72)..(74): n is a, c, g, or t
  misc_feature (77)..(78): n is a, c, g, or t
  misc_feature (80)..(80): n is a, c, g, or t
ctttnggnagtccgaacnccctcnnnganagaccaaanngatgcgnnnngctcntgcaaagggtgaggancnnnatnntngcc

SEQ ID NO: 295 - DNA, 42 bp, Unknown Organism
  polynucleotide sequence showing no homology to known genes
ttgcagaattgatgtggttgctttgctctaaaagttggaact

SEQ ID NO: 296 - DNA, 106 bp, Unknown Organism
  polynucleotide sequence showing no homology to known genes
  misc_feature (8)..(8): n is a, c, g, or t
  misc_feature (14)..(14): n is a, c, g, or t
  misc_feature (16)..(16): n is a, c, g, or t
  misc_feature (18)..(19): n is a, c, g, or t
  misc_feature (21)..(21): n is a, c, g, or t
  misc_feature (24)..(24): n is a, c, g, or t
  misc_feature (26)..(26): n is a, c, g, or t
  misc_feature (35)..(36): n is a, c, g, or t
  misc_feature (38)..(38): n is a, c, g, or t
  misc_feature (47)..(47): n is a, c, g, or t
  misc_feature (65)..(65): n is a, c, g, or t
  misc_feature (67)..(67): n is a, c, g, or t
  misc_feature (74)..(74): n is a, c, g, or t
tttgaagncctttnancnncnctnanaggggctgnngntggacgcancacacgattcacattctncnccttagncgaacgtggtgttcggaacagtttacatcact

SEQ ID NO: 297 - DNA, 78 bp, Unknown Organism
  polynucleotide sequence showing no homology to known genes
  misc_feature (2)..(2): n is a, c, g, or t
  misc_feature (7)..(7): n is a, c, g, or t
  misc_feature (13)..(13): n is a, c, g, or t
  misc_feature (18)..(18): n is a, c, g, or t
  misc_feature (31)..(31): n is a, c, g, or t
  misc_feature (35)..(35): n is a, c, g, or t
  misc_feature (37)..(37): n is a, c, g, or t
  misc_feature (46)..(46): n is a, c, g, or t
ancccanggttanatggngaatcacacgatnacanancttctcctnagccgacgcctgtacggaacagcatactcact

SEQ ID NO: 298 - DNA, 90 bp, Unknown Organism
  polynucleotide sequence showing no homology to known genes
  misc_feature (2)..(2): n is a, c, g, or t
  misc_feature (7)..(8): n is a, c, g, or t
  misc_feature (10)..(10): n is a, c, g, or t
  misc_feature (13)..(14): n is a, c, g, or t
  misc_feature (19)..(20): n is a, c, g, or t
  misc_feature (22)..(22): n is a, c, g, or t
  misc_feature (26)..(26): n is a, c, g, or t
  misc_feature (32)..(33): n is a, c, g, or t
  misc_feature (35)..(35): n is a, c, g, or t
  misc_feature (37)..(37): n is a, c, g, or t
  misc_feature (42)..(42): n is a, c, g, or t
  misc_feature (46)..(46): n is a, c, g, or t
  misc_feature (62)..(62): n is a, c, g, or t
  misc_feature (71)..(71): n is a, c, g, or t
  misc_feature (88)..(88): n is a, c, g, or t
gnttagnnanccnncggtnngngatnggatgnngntnagggnctgnttcaatcctgtatagngactctttnttacccgttgtgttccnct

SEQ ID NO: 299 - DNA, 130 bp, Unknown Organism
  polynucleotide sequence showing no homology to known genes
  misc_feature (7)..(7): n is a, c, g, or t
  misc_feature (12)..(12): n is a, c, g, or t
  misc_feature (18)..(18): n is a, c, g, or t
  misc_feature (36)..(36): n is a, c, g, or t
  misc_feature (64)..(64): n is a, c, g, or t
  misc_feature (74)..(74): n is a, c, g, or t
  misc_feature (106)..(106): n is a, c, g, or t
cctaganagcgngctccngaagagaataaggcaatngccaaagttgcaaaagttcatgcccctncgttagcagnttggatcaattggcacaggagggcctcagctntgcctcgaagatctaaagctttac

SEQ ID NO: 300 - DNA, 143 bp, Unknown Organism
  polynucleotide sequence showing no homology to known genes
  misc_feature (63)..(63): n is a, c, g, or t
ggccctgacgtctcctctatattttatttcctatttcatcttttttgcttcagaaacaatgtntccttttattctcggaccttgtatttagcagtcttagaacgtcggtgacattgtgacactaggttttgggtgattatggc

SEQ ID NO: 301 - DNA, 228 bp, Unknown Organism
  polynucleotide sequence showing no homology to known genes
  misc_feature (1)..(1): n is a, c, g, or t
  misc_feature (4)..(4): n is a, c, g, or t
  misc_feature (73)..(73): n is a, c, g, or t
  misc_feature (88)..(88): n is a, c, g, or t
  misc_feature (91)..(91): n is a, c, g, or t
  misc_feature (116)..(116): n is a, c, g, or t
  misc_feature (118)..(118): n is a, c, g, or t
  misc_feature (131)..(131): n is a, c, g, or t
nttntaacatcacgcatgcataacaaactgtcaattggtgtgaatattcagaagtctcttattcatatcaatnctcagggggaatatnacnactctccaggaaaaagacgtttcananacggacagctgcnaagagatgcagtatgacaagaaattcattcctcttcctccgcctcctccagccatttcacaaagggctccagcgacttgacaaagttttgcctgccc

SEQ ID NO: 302 - DNA, 82 bp, Unknown Organism
  polynucleotide sequence showing no homology to known genes
  misc_feature (51)..(51): n is a, c, g, or t
ataaactctcaagtcctggcggccagaaaaccagctttcaggcggggcggnggggctccccctccccttgcttcgtctctgc

SEQ ID NO: 303 - DNA, 59 bp, Unknown Organism
  polynucleotide sequence showing no homology to known genes
  misc_feature (11)..(11): n is a, c, g, or t
  misc_feature (21)..(21): n is a, c, g, or t
  misc_feature (27)..(27): n is a, c, g, or t
  misc_feature (36)..(36): n is a, c, g, or t
  misc_feature (40)..(40): n is a, c, g, or t
  misc_feature (49)..(49): n is a, c, g, or t
  misc_feature (56)..(56): n is a, c, g, or t
gtaggagtcgnggatgagganagaagngtcctgagnaatngagggaganggtggangat

SEQ ID NO: 304 - DNA, 79 bp, Unknown Organism
  polynucleotide sequence showing no homology to known genes
  misc_feature (1)..(1): n is a, c, g, or t
  misc_feature (6)..(6): n is a, c, g, or t
  misc_feature (9)..(9): n is a, c, g, or t
  misc_feature (16)..(16): n is a, c, g, or t
  misc_feature (18)..(18): n is a, c, g, or t
  misc_feature (25)..(25): n is a, c, g, or t
  misc_feature (33)..(33): n is a, c, g, or t
  misc_feature (38)..(38): n is a, c, g, or t
  misc_feature (45)..(45): n is a, c, g, or t
  misc_feature (55)..(55): n is a, c, g, or t
  misc_feature (66)..(66): n is a, c, g, or t
  misc_feature (73)..(73): n is a, c, g, or t
ncccantgntttgacncngtggtgngaggggtnttaanatgattnagtgctattngctagagtggntataagncttgga

SEQ ID NO: 305 - DNA, 79 bp, Unknown Organism
  polynucleotide sequence showing no homology to known genes
  misc_feature (2)..(2): n is a, c, g, or t
  misc_feature (7)..(7): n is a, c, g, or t
  misc_feature (22)..(22): n is a, c, g, or t
  misc_feature (26)..(26): n is a, c, g, or t
  misc_feature (32)..(32): n is a, c, g, or t
  misc_feature (40)..(40): n is a, c, g, or t
  misc_feature (57)..(57): n is a, c, g, or t
  misc_feature (59)..(59): n is a, c, g, or t
  misc_feature (68)..(68): n is a, c, g, or t
  misc_feature (71)..(71): n is a, c, g, or t
  misc_feature (74)..(74): n is a, c, g, or t
  misc_feature (76)..(76): n is a, c, g, or t
cncgatngtaaacgccccgcancggntatggntaaaaagnagaccctcaacaaaatnanggaattganacntancnaaa

SEQ ID NO: 306 - DNA, 88 bp, Unknown Organism
  polynucleotide sequence showing no homology to known genes
  misc_feature (3)..(3): n is a, c, g, or t
  misc_feature (5)..(5): n is a, c, g, or t
  misc_feature (9)..(10): n is a, c, g, or t
  misc_feature (21)..(21): n is a, c, g, or t
  misc_feature (24)..(24): n is a, c, g, or t
  misc_feature (32)..(32): n is a, c, g, or t
  misc_feature (44)..(44): n is a, c, g, or t
  misc_feature (50)..(50): n is a, c, g, or t
  misc_feature (59)..(59): n is a, c, g, or t
  misc_feature (65)..(67): n is a, c, g, or t
  misc_feature (74)..(74): n is a, c, g, or t
  misc_feature (76)..(76): n is a, c, g, or t
  misc_feature (83)..(83): n is a, c, g, or t
acnantatnngaaggtagagngtntgatgggngaaaaacgaatngggacngggggtgcntaaacnnnagtcagntngaagaanataga

SEQ ID NO: 307 - DNA, 71 bp, Unknown Organism
  polynucleotide sequence showing no homology to known genes
  misc_feature (2)..(2): n is a, c, g, or t
  misc_feature (4)..(5): n is a, c, g, or t
  misc_feature (8)..(8): n is a, c, g, or t
  misc_feature (32)..(32): n is a, c, g, or t
  misc_feature (53)..(53): n is a, c, g, or t
  misc_feature (58)..(58): n is a, c, g, or t
  misc_feature (62)..(62): n is a, c, g, or t
gntnnatnagcactctgttgtgaggtaagggnctggtgcccctcgggatgtanttcantatngccggagat

SEQ ID NO: 308 - DNA, 102 bp, Unknown Organism
  polynucleotide sequence showing no homology to known genes
  misc_feature (1)..(1): n is a, c, g, or t
  misc_feature (5)..(5): n is a, c, g, or t
  misc_feature (45)..(45): n is a, c, g, or t
  misc_feature (74)..(74): n is a, c, g, or t
ntttngggtgacaagtcttatgtctcaggaatagcgccattcatnggtcgcaaaaagcttgaagaacaaactgntctgattttgttcaactttttcttctat

SEQ ID NO: 309 - DNA, 117 bp, Unknown Organism
  polynucleotide sequence showing no homology to known genes
  misc_feature (6)..(6): n is a, c, g, or t
  misc_feature (22)..(22): n is a, c, g, or t
  misc_feature (30)..(30): n is a, c, g, or t
  misc_feature (34)..(34): n is a, c, g, or t
  misc_feature (44)..(44): n is a, c, g, or t
  misc_feature (48)..(48): n is a, c, g, or t
  misc_feature (53)..(53): n is a, c, g, or t
  misc_feature (64)..(64): n is a, c, g, or t
  misc_feature (79)..(79): n is a, c, g, or t
  misc_feature (82)..(82): n is a, c, g, or t
  misc_feature (90)..(90): n is a, c, g, or t
  misc_feature (93)..(94): n is a, c, g, or t
  misc_feature (97)..(98): n is a, c, g, or t
  misc_feature (105)..(105): n is a, c, g, or t
  misc_feature (110)..(110): n is a, c, g, or t
  misc_feature (117)..(117): n is a, c, g, or t
cacctntcaacagcatccagcnactctaancgcnagaaaaacanccgngcctncattgaaaccnccattttgcttttgntgntcgaagcnctnntcnncagatcncgatnctgaaan

SEQ ID NO: 310 - DNA, 90 bp, Unknown Organism
  polynucleotide sequence showing no homology to known genes
  misc_feature (8)..(8): n is a, c, g, or t
  misc_feature (19)..(19): n is a, c, g, or t
  misc_feature (32)..(32): n is a, c, g, or t
  misc_feature (37)..(37): n is a, c, g, or t
  misc_feature (46)..(46): n is a, c, g, or t
  misc_feature (50)..(51): n is a, c, g, or t
  misc_feature (73)..(73): n is a, c, g, or t
  misc_feature (80)..(80): n is a, c, g, or t
  misc_feature (82)..(82): n is a, c, g, or t
ccaaagtntccggctccanagggttagcaagngggangatggcgtngggnnagcgagaatgaaagccttcatnatcccangnagagaaca

SEQ ID NO: 311 - DNA, 132 bp, Unknown Organism
  polynucleotide sequence showing no homology to known genes
  misc_feature (11)..(11): n is a, c, g, or t
  misc_feature (13)..(13): n is a, c, g, or t
  misc_feature (17)..(17): n is a, c, g, or t
  misc_feature (20)..(20): n is a, c, g, or t
  misc_feature (34)..(34): n is a, c, g, or t
  misc_feature (42)..(46): n is a, c, g, or t
  misc_feature (50)..(50): n is a, c, g, or t
  misc_feature (58)..(58): n is a, c, g, or t
  misc_feature (71)..(71): n is a, c, g, or t
  misc_feature (74)..(74): n is a, c, g, or t
  misc_feature (79)..(79): n is a, c, g, or t
  misc_feature (89)..(90): n is a, c, g, or t
  misc_feature (95)..(95): n is a, c, g, or t
  misc_feature (97)..(97): n is a, c, g, or t
  misc_feature (104)..(104): n is a, c, g, or t
  misc_feature (106)..(106): n is a, c, g, or t
  misc_feature (108)..(108): n is a, c, g, or t
cccattttcancnaccnaangcagcctaggttanaacctctnnnnnctgnacaagcancaggctttaaagntgnatgantgaggtcganngcgancntctcagntntnccagtatcctcgcgcctgaaccta

SEQ ID NO: 312 - DNA, 62 bp, Unknown Organism
  polynucleotide sequence showing no homology to known genes
  misc_feature (2)..(2): n is a, c, g, or t
  misc_feature (8)..(8): n is a, c, g, or t
  misc_feature (26)..(26): n is a, c, g, or t
  misc_feature (39)..(39): n is a, c, g, or t
  misc_feature (41)..(41): n is a, c, g, or t
ancctgcntgttgtaaccgcctgggntactaattgtatnanctctgctataaatttttttat

SEQ ID NO: 313 - DNA, 114 bp, Unknown Organism
  polynucleotide sequence showing no homology to known genes
  misc_feature (1)..(4): n is a, c, g, or t
  misc_feature (7)..(11): n is a, c, g, or t
  misc_feature (18)..(18): n is a, c, g, or t
  misc_feature (36)..(36): n is a, c, g, or t
  misc_feature (47)..(48): n is a, c, g, or t
  misc_feature (54)..(54): n is a, c, g, or t
  misc_feature (58)..(58): n is a, c, g, or t
  misc_feature (80)..(80): n is a, c, g, or t
  misc_feature (82)..(85): n is a, c, g, or t
  misc_feature (90)..(91): n is a, c, g, or t
  misc_feature (104)..(104): n is a, c, g, or t
  misc_feature (110)..(110): n is a, c, g, or t
nnnnctnnnnntggggantagaaccattttgttcanttcactttagnntttgtnatgnaatgaaataatagctatatccntnnnntgaannaaatgatggctgntgctgngggg

SEQ ID NO: 314 - DNA, 105 bp, Unknown Organism
  polynucleotide sequence showing no homology to known genes
  misc_feature (11)..(11): n is a, c, g, or t
  misc_feature (13)..(13): n is a, c, g, or t
  misc_feature (21)..(23): n is a, c, g, or t
  misc_feature (25)..(25): n is a, c, g, or t
  misc_feature (32)..(34): n is a, c, g, or t
  misc_feature (41)..(42): n is a, c, g, or t
  misc_feature (45)..(45): n is a, c, g, or t
  misc_feature (51)..(51): n is a, c, g, or t
  misc_feature (55)..(55): n is a, c, g, or t
  misc_feature (57)..(58): n is a, c, g, or t
  misc_feature (61)..(61): n is a, c, g, or t
  misc_feature (77)..(77): n is a, c, g, or t
  misc_feature (91)..(91): n is a, c, g, or t
  misc_feature (95)..(95): n is a, c, g, or t
  misc_feature (102)..(102): n is a, c, g, or t
ctgttttgggngncaaggatnnngnctgaggnnnagcgccnntcnttgttncgcnannagnttgcagaacaaactgntgctgattatgcanaacnttgcctnctg

SEQ ID NO: 315 - DNA, 72 bp, Unknown Organism
  polynucleotide sequence showing no homology to known genes
  misc_feature (3)..(3): n is a, c, g, or t
  misc_feature (7)..(7): n is a, c, g, or t
  misc_feature (9)..(9): n is a, c, g, or t
  misc_feature (16)..(16): n is a, c, g, or t
  misc_feature (20)..(20): n is a, c, g, or t
  misc_feature (31)..(31): n is a, c, g, or t
  misc_feature (41)..(41): n is a, c, g, or t
  misc_feature (66)..(66): n is a, c, g, or t
ccnggangnagacccnctgntggcatcaggntatactagcntcaactagggagtggagaccctatnttgaca

SEQ ID NO: 316 - DNA, 54 bp, Unknown Organism
  polynucleotide sequence showing no homology to known genes
  misc_feature (1)..(1): n is a, c, g, or t
  misc_feature (3)..(3): n is a, c, g, or t
  misc_feature (5)..(5): n is a, c, g, or t
  misc_feature (11)..(12): n is a, c, g, or t
  misc_feature (23)..(23): n is a, c, g, or t
  misc_feature (25)..(25): n is a, c, g, or t
  misc_feature (31)..(31): n is a, c, g, or t
  misc_feature (40)..(40): n is a, c, g, or t
  misc_feature (45)..(46): n is a, c, g, or t
  misc_feature (51)..(51): n is a, c, g, or t
ncntnagatgnntaaaatggtgngntgcttnggctctaangaagnnggggnact

SEQ ID NO: 317 - DNA, 77 bp, Unknown Organism
  polynucleotide sequence showing no homology to known genes
  misc_feature (1)..(1): n is a, c, g, or t
  misc_feature (6)..(12): n is a, c, g, or t
  misc_feature (23)..(24): n is a, c, g, or t
  misc_feature (36)..(36): n is a, c, g, or t
  misc_feature (47)..(47): n is a, c, g, or t
  misc_feature (71)..(71): n is a, c, g, or t
ntcgtnnnnnnnctgtgtactgnnatatgtgtctgnattactcctgntgtaatgcattgacttatacgggncttggg

SEQ ID NO: 318 - DNA, 58 bp, Unknown Organism
  polynucleotide sequence showing no homology to known genes
  misc_feature (2)..(2): n is a, c, g, or t
  misc_feature (4)..(4): n is a, c, g, or t
  misc_feature (7)..(7): n is a, c, g, or t
  misc_feature (17)..(17): n is a, c, g, or t
  misc_feature (29)..(29): n is a, c, g, or t
  misc_feature (43)..(43): n is a, c, g, or t
  misc_feature (46)..(46): n is a, c, g, or t
  misc_feature (51)..(51): n is a, c, g, or t
  misc_feature (56)..(56): n is a, c, g, or t
tngntangcccctattngttacaggatcnctactttcccacanaanatcgnccatngc

SEQ ID NO: 319 - DNA, 91 bp, Unknown Organism
  polynucleotide sequence showing no homology to known genes
  misc_feature (3)..(3): n is a, c, g, or t
  misc_feature (7)..(7): n is a, c, g, or t
  misc_feature (15)..(16): n is a, c, g, or t
  misc_feature (42)..(42): n is a, c, g, or t
  misc_feature (48)..(48): n is a, c, g, or t
ttntaanaccccatnntgcatctcacataatggaccggccancaatangtgaattagctggatgatattcaaacgaaaattcatcatctcc

SEQ ID NO: 320 - DNA, 191 bp, Unknown Organism
  polynucleotide sequence showing no homology to known genes
  misc_feature (4)..(4): n is a, c, g, or t
  misc_feature (16)..(16): n is a, c, g, or t
  misc_feature (19)..(19): n is a, c, g, or t
  misc_feature (107)..(107): n is a, c, g, or t
ttgnaagccctagttntancccagcaggggctgctcctgaagggcaattttacccaccttattatccaccctatgggtatacgccaccacctctaccatatcaacantattatcctcaaccttatcaagctacaaccccactccacctggtggtcagcaagccacacatcagcagcagcggcacaacaacc

SEQ ID NO: 321 - DNA, 190 bp, Unknown Organism
  polynucleotide sequence showing no homology to known genes
  misc_feature (17)..(17): n is a, c, g, or t
  misc_feature (25)..(25): n is a, c, g, or t
  misc_feature (44)..(44): n is a, c, g, or t
  misc_feature (47)..(47): n is a, c, g, or t
  misc_feature (49)..(49): n is a, c, g, or t
  misc_feature (77)..(78): n is a, c, g, or t
  misc_feature (80)..(80): n is a, c, g, or t
  misc_feature (92)..(92): n is a, c, g, or t
  misc_feature (110)..(110): n is a, c, g, or t
  misc_feature (135)..(135): n is a, c, g, or t
  misc_feature (153)..(153): n is a, c, g, or t
  misc_feature (157)..(157): n is a, c, g, or t
tttgtagccctagttgntcccaggnggggctgctcgtgaagggnaantntacccaccttattatccaccctatgggnntncgccaccacctntaccatatcaacagtatnatcctcaaccttatcaagctacaancccactccacctggtggncagnaagccacacatcagcagcagcggcacaacaacc

SEQ ID NO: 322 - DNA, 75 bp, Unknown Organism
  polynucleotide sequence showing no homology to known genes
  misc_feature (23)..(23): n is a, c, g, or t
  misc_feature (45)..(45): n is a, c, g, or t
  misc_feature (62)..(62): n is a, c, g, or t
  misc_feature (70)..(70): n is a, c, g, or t
tgcccagggaatgggtattgggngcagttgtaccgggaacactanatgactatcaaaaatgngcttcacnggaca

SEQ ID NO: 323 - DNA, 71 bp, Unknown Organism
  polynucleotide sequence showing no homology to known genes
  misc_feature (4)..(5): n is a, c, g, or t
  misc_feature (11)..(11): n is a, c, g, or t
  misc_feature (13)..(13): n is a, c, g, or t
  misc_feature (15)..(15): n is a, c, g, or t
  misc_feature (23)..(24): n is a, c, g, or t
  misc_feature (27)..(27): n is a, c, g, or t
  misc_feature (30)..(31): n is a, c, g, or t
  misc_feature (63)..(63): n is a, c, g, or t
gctnnggaatngnantggagcanntgnacnnggacactacatgactatcaaaaatgggcgtcntcacgaca

SEQ ID NO: 324 - DNA, 90 bp, Unknown Organism
  polynucleotide sequence showing no homology to known genes
tgaaactatgtgcaagaattagtcagttgacaataatttgattgagtctttcaattcttagcattttggaagctagatacaagcctatga

SEQ ID NO: 325 - DNA, 171 bp, Unknown Organism
  polynucleotide sequence showing no homology to known genes
  misc_feature (4)..(4): n is a, c, g, or t
  misc_feature (9)..(10): n is a, c, g, or t
  misc_feature (26)..(26): n is a, c, g, or t
  misc_feature (32)..(33): n is a, c, g, or t
  misc_feature (52)..(52): n is a, c, g, or t
  misc_feature (56)..(56): n is a, c, g, or t
  misc_feature (58)..(58): n is a, c, g, or t
  misc_feature (65)..(65): n is a, c, g, or t
  misc_feature (73)..(73): n is a, c, g, or t
  misc_feature (98)..(98): n is a, c, g, or t
  misc_feature (105)..(105): n is a, c, g, or t
atcntgatnntcggccatctggtacntggaannggcgctggtgagacttgantctngncagaggnggaccccnagccacgagcaggatgctgcattancattgcnatcagcagtataggaattctcttgctctggccagatcgaatttgagggccatggcatcaagagcca

SEQ ID NO: 326 - DNA, 111 bp, Unknown Organism
  polynucleotide sequence showing no homology to known genes
  misc_feature (38)..(39): n is a, c, g, or t
gttaatacccggatgtggaacaggaacttcagtctgtnngataagaattacctctccagcatccaggctcagcagactctgcatcagatttcttcacaattcaatggtgct

SEQ ID NO: 327 - DNA, 142 bp, Unknown Organism
  polynucleotide sequence showing no homology to known genes
  misc_feature (6)..(6): n is a, c, g, or t
  misc_feature (12)..(12): n is a, c, g, or t
  misc_feature (17)..(17): n is a, c, g, or t
  misc_feature (36)..(36): n is a, c, g, or t
tttttntagctnctaanagcccaaatttctccgagnccaaaacaaggtcaaggtccaaacagtgaattggccttggagcagggcgtgaaagactctgatatagatgctgcaaaagttgctgcattgaaggctgctgaactag

SEQ ID NO: 328 - DNA, 156 bp, Unknown Organism
  polynucleotide sequence showing no homology to known genes
  misc_feature (2)..(3): n is a, c, g, or t
  misc_feature (6)..(6): n is a, c, g, or t
  misc_feature (10)..(11): n is a, c, g, or t
  misc_feature (16)..(16): n is a, c, g, or t
  misc_feature (33)..(33): n is a, c, g, or t
  misc_feature (36)..(36): n is a, c, g, or t
  misc_feature (40)..(40): n is a, c, g, or t
  misc_feature (48)..(48): n is a, c, g, or t
  misc_feature (50)..(50): n is a, c, g, or t
  misc_feature (58)..(58): n is a, c, g, or t
  misc_feature (63)..(63): n is a, c, g, or t
  misc_feature (76)..(76): n is a, c, g, or t
  misc_feature (90)..(90): n is a, c, g, or t
  misc_feature (115)..(115): n is a, c, g, or t
  misc_feature (127)..(127): n is a, c, g, or t
  misc_feature (135)..(135): n is a, c, g, or t
  misc_feature (138)..(138): n is a, c, g, or t
  misc_feature (144)..(146): n is a, c, g, or t
  misc_feature (149)..(149): n is a, c, g, or t
  misc_feature (155)..(155): n is a, c, g, or t
tnngcngatnntaaantcccctcttcgacgacnacngctnagcatgcntntgtctgangagtnctaaaggctgttnccaaatttactagntcttgacatgcgtatctaactggantgattggtagantataaaantgngacaannngtntgactng

SEQ ID NO: 329 - DNA, 172 bp, Unknown Organism
  polynucleotide sequence showing no homology to known genes
  misc_feature (13)..(13): n is a, c, g, or t
  misc_feature (33)..(33): n is a, c, g, or t
  misc_feature (64)..(64): n is a, c, g, or t
  misc_feature (78)..(78): n is a, c, g, or t
  misc_feature (83)..(83): n is a, c, g, or t
  misc_feature (93)..(93): n is a, c, g, or t
  misc_feature (96)..(96): n is a, c, g, or t
  misc_feature (100)..(100): n is a, c, g, or t
  misc_feature (109)..(110): n is a, c, g, or t
  misc_feature (122)..(122): n is a, c, g, or t
  misc_feature (124)..(124): n is a, c, g, or t
  misc_feature (135)..(135): n is a, c, g, or t
  misc_feature (142)..(142): n is a, c, g, or t
  misc_feature (144)..(144): n is a, c, g, or t
  misc_feature (147)..(147): n is a, c, g, or t
  misc_feature (153)..(153): n is a, c, g, or t
tttaaaacccttntaaaaaccgaaaaatgcttntaaaagggtccaaggcagagaccaagaaaantaactgttgaagancgganagatggaagnaangtanaattttgtnnaaggatatggtnangattgtttttnaagagangncgnaaaacnaaccccaaaattcctccag

SEQ ID NO: 330 - DNA, 242 bp, Unknown Organism
  polynucleotide sequence showing no homology to known genes
  misc_feature (12)..(12): n is a, c, g, or t
  misc_feature (20)..(20): n is a, c, g, or t
  misc_feature (35)..(35): n is a, c, g, or t
  misc_feature (38)..(38): n is a, c, g, or t
  misc_feature (48)..(48): n is a, c, g, or t
  misc_feature (52)..(52): n is a, c, g, or t
  misc_feature (57)..(57): n is a, c, g, or t
  misc_feature (64)..(65): n is a, c, g, or t
  misc_feature (68)..(68): n is a, c, g, or t
  misc_feature (71)..(71): n is a, c, g, or t
  misc_feature (73)..(75): n is a, c, g, or t
  misc_feature (79)..(79): n is a, c, g, or t
  misc_feature (81)..(81): n is a, c, g, or t
  misc_feature (84)..(85): n is a, c, g, or t
  misc_feature (91)..(91): n is a, c, g, or t
  misc_feature (98)..(98): n is a, c, g, or t
  misc_feature (101)..(101): n is a, c, g, or t
  misc_feature (110)..(110): n is a, c, g, or t
  misc_feature (113)..(113): n is a, c, g, or t
  misc_feature (116)..(116): n is a, c, g, or t
  misc_feature (120)..(120): n is a, c, g, or t
  misc_feature (130)..(131): n is a, c, g, or t
  misc_feature (133)..(133): n is a, c, g, or t
  misc_feature (136)..(136): n is a, c, g, or t
  misc_feature (139)..(139): n is a, c, g, or t
  misc_feature (148)..(148): n is a, c, g, or t
  misc_feature (157)..(157): n is a, c, g, or t
  misc_feature (159)..(159): n is a, c, g, or t
  misc_feature (185)..(185): n is a, c, g, or t
  misc_feature (188)..(188): n is a, c, g, or t
  misc_feature (190)..(190): n is a, c, g, or t
  misc_feature (193)..(193): n is a, c, g, or t
  misc_feature (199)..(199): n is a, c, g, or t
  misc_feature (219)..(219): n is a, c, g, or t
  misc_feature (225)..(226): n is a, c, g, or t
  misc_feature (233)..(233): n is a, c, g, or t
  misc_feature (235)..(236): n is a, c, g, or t
  misc_feature (239)..(239): n is a, c, g, or t
ttttagcggctnctaaagcncggactaagagaccntcngcaaatggcnaggnttgcnaggtaanngcntgncnnncgcnantcnnagtgcncccttcnatnttagtactnttncgnattnttagactatnnanggnganagtagtacngaccggaanangaggctcgagacttgtgacaccagancanantgngctacncccccgctaggtattgtacncttccnnatgaacntnncgntgc

SEQ ID NO: 331 - DNA, 128 bp, Unknown Organism
  polynucleotide sequence showing no homology to known genes
  misc_feature (2)..(2): n is a, c, g, or t
  misc_feature (4)..(10): n is a, c, g, or t
  misc_feature (13)..(13): n is a, c, g, or t
  misc_feature (20)..(20): n is a, c, g, or t
  misc_feature (22)..(22): n is a, c, g, or t
  misc_feature (24)..(24): n is a, c, g, or t
  misc_feature (39)..(39): n is a, c, g, or t
  misc_feature (75)..(75): n is a, c, g, or t
tncnnnnnnnctnccgagcngntntctctgacttaggtntatattctaggaactcttcagtgggaaatgccgttnaaattatgatactaactgttaaggtaggaaagattactggttgacacagcata

SEQ ID NO: 332 - DNA, 140 bp, Unknown Organism
  polynucleotide sequence showing no homology to known genes
  misc_feature (2)..(5): n is a, c, g, or t
  misc_feature (9)..(12): n is a, c, g, or t
  misc_feature (15)..(15): n is a, c, g, or t
  misc_feature (19)..(20): n is a, c, g, or t
  misc_feature (26)..(26): n is a, c, g, or t
  misc_feature (44)..(44): n is a, c, g, or t
  misc_feature (47)..(48): n is a, c, g, or t
  misc_feature (53)..(54): n is a, c, g, or t
  misc_feature (77)..(77): n is a, c, g, or t
  misc_feature (91)..(91): n is a, c, g, or t
  misc_feature (96)..(99): n is a, c, g, or t
  misc_feature (102)..(103): n is a, c, g, or t
  misc_feature (108)..(108): n is a, c, g, or t
  misc_feature (112)..(112): n is a, c, g, or t
  misc_feature (117)..(117): n is a, c, g, or t
  misc_feature (123)..(124): n is a, c, g, or t
  misc_feature (127)..(127): n is a, c, g, or t
  misc_feature (130)..(130): n is a, c, g, or t
  misc_feature (139)..(139): n is a, c, g, or t
gnnnntgtnnnnggngtgnncgcatngggtgagtggagttcacnagnntgggnnactgaaatttatagagacgctantgagggggcggagnggccnnnntcnnattcngacnttctngtgccnnatnacnattagaagna

SEQ ID NO: 333 - DNA, 147 bp, Unknown Organism
  polynucleotide sequence showing no homology to known genes
  misc_feature (4)..(6): n is a, c, g, or t
  misc_feature (8)..(11): n is a, c, g, or t
  misc_feature (14)..(14): n is a, c, g, or t
  misc_feature (25)..(25): n is a, c, g, or t
  misc_feature (29)..(29): n is a, c, g, or t
  misc_feature (38)..(38): n is a, c, g, or t
  misc_feature (49)..(49): n is a, c, g, or t
  misc_feature (67)..(67): n is a, c, g, or t
  misc_feature (85)..(85): n is a, c, g, or t
  misc_feature (87)..(87): n is a, c, g, or t
  misc_feature (89)..(89): n is a, c, g, or t
  misc_feature (96)..(96): n is a, c, g, or t
  misc_feature (103)..(104): n is a, c, g, or t
  misc_feature (109)..(110): n is a, c, g, or t
  misc_feature (121)..(121): n is a, c, g, or t
  misc_feature (123)..(123): n is a, c, g, or t
  misc_feature (130)..(130): n is a, c, g, or t
  misc_feature (134)..(135): n is a, c, g, or t
cccnnngnnnncgnggaattgcganttgnaaagcaacntgttgtcatgnagagcaggaaacaaaatntcgtatctcgatctagancntnagcacantacaganntatgnnacaggctgtgngngaggtantcanntatcggtttgta

SEQ ID NO: 334 - DNA, 185 bp, Unknown Organism
  polynucleotide sequence showing no homology to known genes
  misc_feature (2)..(6): n is a, c, g, or t
  misc_feature (8)..(11): n is a, c, g, or t
  misc_feature (14)..(14): n is a, c, g, or t
  misc_feature (16)..(16): n is a, c, g, or t
  misc_feature (29)..(29): n is a, c, g, or t
  misc_feature (31)..(31): n is a, c, g, or t
  misc_feature (37)..(37): n is a, c, g, or t
  misc_feature (45)..(45): n is a, c, g, or t
  misc_feature (53)..(54): n is a, c, g, or t
  misc_feature (59)..(59): n is a, c, g, or t
  misc_feature (65)..(65): n is a, c, g, or t
  misc_feature (67)..(68): n is a, c, g, or t
  misc_feature (71)..(71): n is a, c, g, or t
  misc_feature (73)..(73): n is a, c, g, or t
  misc_feature (76)..(76): n is a, c, g, or t
  misc_feature (81)..(81): n is a, c, g, or t
  misc_feature (90)..(90): n is a, c, g, or t
  misc_feature (93)..(93): n is a, c, g, or t
  misc_feature (107)..(107): n is a, c, g, or t
  misc_feature (111)..(111): n is a, c, g, or t
  misc_feature (113)..(113): n is a, c, g, or t
  misc_feature (129)..(129): n is a, c, g, or t
  misc_feature (138)..(140): n is a, c, g, or t
  misc_feature (149)..(149): n is a, c, g, or t
gnnnnncnnnngcngntctgtggtcttgncnttgganattaagcncctacttnntacgntactgnannagncngcntctangagcaagcnacnagccctactactanattnanctactgcctttatgtntaacaaagnnngagcaaganaggaccaacagatgctactagctagagttgatcata

SEQ ID NO: 335 - DNA, 187 bp, Unknown Organism
  polynucleotide sequence showing no homology to known genes
  misc_feature (5)..(5): n is a, c, g, or t
  misc_feature (7)..(10): n is a, c, g, or t
  misc_feature (12)..(12): n is a, c, g, or t
  misc_feature (48)..(48): n is a, c, g, or t
  misc_feature (50)..(50): n is a, c, g, or t
taaangnnnngnagcaaggaagctctagcttgaaggatgctgattatnanttttgattagaattttacaaatgtaaagaattatactaatgtaaagaactacgtttgggcttgatccccataggagcttagcccggggtacgtaggcaacctgtgagaaaaggagagatcaggtgcagccccttgta

SEQ ID NO: 336 - DNA, 77 bp, Unknown Organism
  polynucleotide sequence showing no homology to known genes
  misc_feature (3)..(3): n is a, c, g, or t
  misc_feature (9)..(9): n is a, c, g, or t
  misc_feature (11)..(11): n is a, c, g, or t
  misc_feature (32)..(32): n is a, c, g, or t
  misc_feature (34)..(36): n is a, c, g, or t
  misc_feature (42)..(42): n is a, c, g, or t
  misc_feature (44)..(44): n is a, c, g, or t
  misc_feature (73)..(73): n is a, c, g, or t
  misc_feature (76)..(76): n is a, c, g, or t
acncgaatngnaaaggaacccgaaactatgantnnnaaactngnaattctttgatgctacaaattggcactgnatng

SEQ ID NO: 337 - DNA, 103 bp, Unknown Organism
  polynucleotide sequence showing no homology to known genes
  misc_feature (2)..(2): n is a, c, g, or t
  misc_feature (11)..(12): n is a, c, g, or t
  misc_feature (28)..(28): n is a, c, g, or t
  misc_feature (30)..(30): n is a, c, g, or t
gngtccaattnnggtttacgtgttactntngttttccctgctcatactaagctgtgaagatgatttagtgctatttgagtagcagtggttgtaagccttggga

SEQ ID NO: 338 - DNA, 94 bp, Unknown Organism
  polynucleotide sequence showing no homology to known genes
  misc_feature (8)..(8): n is a, c, g, or t
  misc_feature (15)..(15): n is a, c, g, or t
  misc_feature (23)..(23): n is a, c, g, or t
  misc_feature (33)..(33): n is a, c, g, or t
  misc_feature (47)..(48): n is a, c, g, or t
  misc_feature (66)..(66): n is a, c, g, or t
  misc_feature (92)..(92): n is a, c, g, or t
gttgtgtnccattcngcatgctntattacatgngttgtatgaggtgnnactgatcaggaacactanatgactatcaaaaatgtgctttacgnca

SEQ ID NO: 339 - DNA, 52 bp, Unknown Organism
  polynucleotide sequence showing no homology to known genes
  misc_feature (16)..(16): n is a, c, g, or t
  misc_feature (44)..(44): n is a, c, g, or t
cattgtcttctttttntttcttcttttggcgaattttcttttgntttcttga

SEQ ID NO: 340 - DNA, 68 bp, Unknown Organism
  polynucleotide sequence showing no homology to known genes
  misc_feature (13)..(13): n is a, c, g, or t
ctgggtgtaagtngaagaaggataatggacaagtgatccaaagcattatagggacgacactttaggca

SEQ ID NO: 341 - DNA, 52 bp, Unknown Organism
  polynucleotide sequence showing no homology to known genes
  misc_feature (1)..(1): n is a, c, g, or t
  misc_feature (16)..(16): n is a, c, g, or t
  misc_feature (19)..(19): n is a, c, g, or t
  misc_feature (22)..(22): n is a, c, g, or t
  misc_feature (25)..(25): n is a, c, g, or t
  misc_feature (46)..(46): n is a, c, g, or t
  misc_feature (49)..(51): n is a, c, g, or t
nggccggagtgggtgnggngangantggatcgttggtgagtggtgngtnnnc

SEQ ID NO: 342 - DNA, 75 bp, Unknown Organism
  polynucleotide sequence showing no homology to known genes
  misc_feature (21)..(21): n is a, c, g, or t
  misc_feature (51)..(51): n is a, c, g, or t
  misc_feature (57)..(57): n is a, c, g, or t
  misc_feature (65)..(65): n is a, c, g, or t
  misc_feature (70)..(70): n is a, c, g, or t
  misc_feature (72)..(73): n is a, c, g, or t
  misc_feature (75)..(75): n is a, c, g, or t
gccgcatacatgcatatccgnggggcagcaggatgcgggaacagttttttnatgggnacccctantgcangnncn

SEQ ID NO: 343 - DNA, 87 bp, Unknown Organism
  polynucleotide sequence showing no homology to known genes
  misc_feature (6)..(7): n is a, c, g, or t
  misc_feature (10)..(10): n is a, c, g, or t
  misc_feature (18)..(18): n is a, c, g, or t
  misc_feature (24)..(24): n is a, c, g, or t
  misc_feature (31)..(31): n is a, c, g, or t
  misc_feature (36)..(36): n is a, c, g, or t
  misc_feature (41)..(41): n is a, c, g, or t
  misc_feature (48)..(48): n is a, c, g, or t
  misc_feature (53)..(53): n is a, c, g, or t
  misc_feature (55)..(55): n is a, c, g, or t
  misc_feature (58)..(58): n is a, c, g, or t
  misc_feature (68)..(68): n is a, c, g, or t
  misc_feature (71)..(71): n is a, c, g, or t
  misc_feature (74)..(74): n is a, c, g, or t
aatccnngtntaagattntcagcnttgggcnagagnaagcnctaatcntgatnancantggtgaaccnaantanccagttaccacct

SEQ ID NO: 344 - DNA, 80 bp, Unknown Organism
  polynucleotide sequence showing no homology to known genes
  misc_feature (14)..(14): n is a, c, g, or t
  misc_feature (34)..(35): n is a, c, g, or t
  misc_feature (54)..(54): n is a, c, g, or t
  misc_feature (58)..(59): n is a, c, g, or t
  misc_feature (64)..(64): n is a, c, g, or t
  misc_feature (67)..(67): n is a, c, g, or t
  misc_feature (71)..(71): n is a, c, g, or t
  misc_feature (78)..(80): n is a, c, g, or t
gctcttctgtaaanggttattttttgactgacanncaagggggtaaatttttanttannaccanaanttgnttaaggnnn

SEQ ID NO: 345 - DNA, 92 bp, Unknown Organism
  polynucleotide sequence showing no homology to known genes
  misc_feature (53)..(53): n is a, c, g, or t
  misc_feature (56)..(56): n is a, c, g, or t
acgtacacattctcctcaattgctcaggaaatggtattgggtgcagttgtacnggnaacactacatgactatcaaaaatgtgcttcacgaca

SEQ ID NO: 346 - DNA, 117 bp, Unknown Organism
  polynucleotide sequence showing no homology to known genes
  misc_feature (11)..(11): n is a, c, g, or t
  misc_feature (35)..(35): n is a, c, g, or t
  misc_feature (84)..(84): n is a, c, g, or t
  misc_feature (103)..(103): n is a, c, g, or t
  misc_feature (108)..(109): n is a, c, g, or t
  misc_feature (112)..(112): n is a, c, g, or t
ggtgcgatcgnctgccgaagaagcgttgtacttgnaaaatatcggaggaaatatccctgaaataactgccaacgctggtgcagncaaaaggtactatgttcgntcttnnatntagca

SEQ ID NO: 347 - DNA, 139 bp, Unknown Organism
  polynucleotide sequence showing no homology to known genes
  misc_feature (1)..(1): n is a, c, g, or t
  misc_feature (3)..(3): n is a, c, g, or t
  misc_feature (15)..(15): n is a, c, g, or t
  misc_feature (21)..(21): n is a, c, g, or t
  misc_feature (24)..(24): n is a, c, g, or t
  misc_feature (34)..(34): n is a, c, g, or t
  misc_feature (36)..(36): n is a, c, g, or t
  misc_feature (43)..(43): n is a, c, g, or t
  misc_feature (52)..(52): n is a, c, g, or t
  misc_feature (71)..(71): n is a, c, g, or t
  misc_feature (73)..(74): n is a, c, g, or t
  misc_feature (82)..(82): n is a, c, g, or t
  misc_feature (88)..(89): n is a, c, g, or t
  misc_feature (99)..(99): n is a, c, g, or t
  misc_feature (119)..(119): n is a, c, g, or t
  misc_feature (122)..(122): n is a, c, g, or t
ncngttatagtcganacacanggnatgccctctngnaaacatntattgtacnggatgacgtattctgatantnncttcaaanaaaganncatcactagngagcacgaaagataagtgtnttntctcaaagaaatgacca

SEQ ID NO: 348 - DNA, 181 bp, Unknown Organism
  polynucleotide sequence showing no homology to known genes
  misc_feature (2)..(2): n is a, c, g, or t
  misc_feature (7)..(7): n is a, c, g, or t
  misc_feature (10)..(10): n is a, c, g, or t
  misc_feature (16)..(17): n is a, c, g, or t
  misc_feature (19)..(19): n is a, c, g, or t
  misc_feature (22)..(22): n is a, c, g, or t
  misc_feature (29)..(29): n is a, c, g, or t
  misc_feature (32)..(32): n is a, c, g, or t
  misc_feature (35)..(36): n is a, c, g, or t
  misc_feature (39)..(39): n is a, c, g, or t
  misc_feature (44)..(46): n is a, c, g, or t
  misc_feature (48)..(48): n is a, c, g, or t
  misc_feature (54)..(54): n is a, c, g, or t
  misc_feature (56)..(57): n is a, c, g, or t
  misc_feature (60)..(61): n is a, c, g, or t
  misc_feature (63)..(63): n is a, c, g, or t
  misc_feature (69)..(69): n is a, c, g, or t
  misc_feature (71)..(71): n is a, c, g, or t
  misc_feature (78)..(79): n is a, c, g, or t
  misc_feature (82)..(82): n is a, c, g, or t
  misc_feature (86)..(86): n is a, c, g, or t
  misc_feature (88)..(88): n is a, c, g, or t
  misc_feature (97)..(97): n is a, c, g, or t
  misc_feature (100)..(100): n is a, c, g, or t
  misc_feature (106)..(106): n is a, c, g, or t
  misc_feature (108)..(108): n is a, c, g, or t
  misc_feature (114)..(114): n is a, c, g, or t
  misc_feature (118)..(118): n is a, c, g, or t
  misc_feature (123)..(123): n is a, c, g, or t
  misc_feature (126)..(126): n is a, c, g, or t
  misc_feature (131)..(133): n is a, c, g, or t
  misc_feature (135)..(136): n is a, c, g, or t
  misc_feature (140)..(140): n is a, c, g, or t
  misc_feature (144)..(144): n is a, c, g, or t
  misc_feature (147)..(147): n is a, c, g, or t
  misc_feature (150)..(150): n is a, c, g, or t
  misc_feature (156)..(156): n is a, c, g, or t
  misc_feature (161)..(162): n is a, c, g, or t
  misc_feature (167)..(167): n is a, c, g, or t
  misc_feature (172)..(172): n is a, c, g, or t
  misc_feature (174)..(175): n is a, c, g, or t
  misc_feature (178)..(178): n is a, c, g, or t
  misc_feature (180)..(180): n is a, c, g, or t
tngccgnttnccatgnngnacntggatantcnaannctntccgnnngngctcgngnntanngnccggcnanacaccannccnactntntgtgacgcntgnaggacnanctatgntggnagganttnatagnnngnnccanatcngcnctngacagncactnncctgngactncnntgnanc

SEQ ID NO: 349 - DNA, 228 bp, Unknown Organism
  polynucleotide sequence showing no homology to known genes
  misc_feature (4)..(4): n is a, c, g, or t
  misc_feature (10)..(10): n is a, c, g, or t
  misc_feature (23)..(24): n is a, c, g, or t
  misc_feature (94)..(94): n is a, c, g, or t
  misc_feature (212)..(212): n is a, c, g, or t
  misc_feature (218)..(218): n is a, c, g, or t
tagnccgctngttcaagagattnngctctggcatctgtaagtgagatatcaaagcgcacttctgaaacccctcaacgagaaaatagaaggaatncaacaaagattgaccaaccattctgtagaagcagaacagaaaagggtgaattgctatcacactcaggaaattttgaatcaataaacgagaatggaaacagaacatgttcccgtactgnattttntcctttcagc

SEQ ID NO: 350 - DNA, 99 bp, Unknown Organism
  polynucleotide sequence showing no homology to known genes
  misc_feature (7)..(7): n is a, c, g, or t
  misc_feature (11)..(11): n is a, c, g, or t
  misc_feature (16)..(16): n is a, c, g, or t
  misc_feature (34)..(35): n is a, c, g, or t
  misc_feature (38)..(38): n is a, c, g, or t
  misc_feature (42)..(42): n is a, c, g, or t
  misc_feature (48)..(49): n is a, c, g, or t
  misc_feature (52)..(52): n is a, c, g, or t
  misc_feature (60)..(60): n is a, c, g, or t
  misc_feature (66)..(66): n is a, c, g, or t
  misc_feature (68)..(68): n is a, c, g, or t
cccaaantccntcttntacgattactcaggaacnnatnatgngattgnnctngaccgaangccttntncgtgattacctggaaaagctgcagctggaca

SEQ ID NO: 351 - DNA, 44 bp, Unknown Organism
  polynucleotide sequence showing no homology to known genes
  misc_feature (21)..(21): n is a, c, g, or t
  misc_feature (24)..(24): n is a, c, g, or t
  misc_feature (26)..(26): n is a, c, g, or t
  misc_feature (28)..(28): n is a, c, g, or t
  misc_feature (35)..(35): n is a, c, g, or t
  misc_feature (37)..(37): n is a, c, g, or t
  misc_feature (40)..(40): n is a, c, g, or t
tactatgttattgttcgtcanganantntgcaacngntgnccca

SEQ ID NO: 352 - DNA, 81 bp, Unknown Organism
  polynucleotide sequence showing no homology to known genes
  misc_feature (17)..(17): n is a, c, g, or t
  misc_feature (23)..(23): n is a, c, g, or t
  misc_feature (26)..(26): n is a, c, g, or t
  misc_feature (30)..(31): n is a, c, g, or t
  misc_feature (34)..(34): n is a, c, g, or t
  misc_feature (37)..(37): n is a, c, g, or t
  misc_feature (39)..(39): n is a, c, g, or t
  misc_feature (41)..(41): n is a, c, g, or t
  misc_feature (45)..(45): n is a, c, g, or t
  misc_feature (51)..(51): n is a, c, g, or t
  misc_feature (61)..(61): n is a, c, g, or t
  misc_feature (65)..(65): n is a, c, g, or t
  misc_feature (70)..(71): n is a, c, g, or t
gcgagggcctcccaagntgagtntgnagcnnggngtnangnaatnaagagnagaaagaggntcangcggnngaaaatgtaa

SEQ ID NO: 353 - DNA, 90 bp, Unknown Organism
  polynucleotide sequence showing no homology to known genes
  misc_feature (19)..(19): n is a, c, g, or t
  misc_feature (30)..(30): n is a, c, g, or t
  misc_feature (36)..(36): n is a, c, g, or t
  misc_feature (48)..(48): n is a, c, g, or t
  misc_feature (61)..(61): n is a, c, g, or t
  misc_feature (64)..(64): n is a, c, g, or t
  misc_feature (70)..(70): n is a, c, g, or t
  misc_feature (73)..(74): n is a, c, g, or t
  misc_feature (83)..(84): n is a, c, g, or t
gcgcgggaccctaccgaangggtaatttgnagcagnctcgtacaaaanataggaggagtanaangtaagntcnngcggaagannatgtaa

SEQ ID NO: 354 - DNA, 92 bp, Unknown Organism
  polynucleotide sequence showing no homology to known genes
  misc_feature (5)..(5): n is a, c, g, or t
tgtgnttcttcctgttatggggacttgttggttatttccttttttgtgaagctctggtcgttacctcaaagtgtatgtacttccaaacggaa

SEQ ID NO: 355 - DNA, 58 bp, Unknown Organism
  polynucleotide sequence showing no homology to known genes
attgtcttctcttttggtttcttttcttttggcgaattttcttttgttttctgcttga

SEQ ID NO: 356 - DNA, 65 bp, Unknown Organism
  polynucleotide sequence showing no homology to known genes
  misc_feature (48)..(48): n is a, c, g, or t
  misc_feature (53)..(53): n is a, c, g, or t
aagcactctgttgtgaggtaaggcctagtccccctctctatgtacttnatttntgccatacattt

SEQ ID NO: 357 - DNA, 103 bp, Unknown Organism
  polynucleotide sequence showing no homology to known genes
  misc_feature (9)..(9): n is a, c, g, or t
  misc_feature (25)..(25): n is a, c, g, or t
  misc_feature (44)..(44): n is a, c, g, or t
  misc_feature (50)..(50): n is a, c, g, or t
  misc_feature (54)..(54): n is a, c, g, or t
  misc_feature (64)..(64): n is a, c, g, or t
  misc_feature (70)..(70): n is a, c, g, or t
  misc_feature (77)..(78): n is a, c, g, or t
  misc_feature (87)..(87): n is a, c, g, or t
  misc_feature (92)..(92): n is a, c, g, or t
  misc_feature (99)..(99): n is a, c, g, or t
ggattcaanccatcgagggtccatngtggtctccggcttacggnctattngtgntcaactattnggtggnccgcatnnttcttgtanactancgggaanatct

SEQ ID NO: 358 - DNA, 103 bp, Unknown Organism
  polynucleotide sequence showing no homology to known genes
  misc_feature (8)..(8): n is a, c, g, or t
  misc_feature (10)..(10): n is a, c, g, or t
  misc_feature (15)..(15): n is a, c, g, or t
  misc_feature (22)..(22): n is a, c, g, or t
  misc_feature (25)..(25): n is a, c, g, or t
  misc_feature (30)..(30): n is a, c, g, or t
  misc_feature (60)..(60): n is a, c, g, or t
  misc_feature (64)..(64): n is a, c, g, or t
  misc_feature (79)..(80): n is a, c, g, or t
  misc_feature (83)..(83): n is a, c, g, or t
tgctcagntngatcnaaggggngtnttttnacatggaacagggcaactgcctctacttgntttnatgcctttttcattnngtncatttctagggatcggccgt

SEQ ID NO: 359 - DNA, 222 bp, Unknown Organism
  polynucleotide sequence showing no homology to known genes
  misc_feature (4)..(7): n is a, c, g, or t
  misc_feature (10)..(10): n is a, c, g, or t
  misc_feature (13)..(14): n is a, c, g, or t
  misc_feature (17)..(17): n is a, c, g, or t
  misc_feature (22)..(22): n is a, c, g, or t
  misc_feature (29)..(29): n is a, c, g, or t
  misc_feature (34)..(34): n is a, c, g, or t
  misc_feature (41)..(41): n is a, c, g, or t
  misc_feature (45)..(45): n is a, c, g, or t
  misc_feature (51)..(51): n is a, c, g, or t
  misc_feature (54)..(54): n is a, c, g, or t
  misc_feature (61)..(62): n is a, c, g, or t
  misc_feature (66)..(66): n is a, c, g, or t
  misc_feature (72)..(72): n is a, c, g, or t
  misc_feature (80)..(80): n is a, c, g, or t
  misc_feature (84)..(84): n is a, c, g, or t
  misc_feature (86)..(86): n is a, c, g, or t
  misc_feature (90)..(90): n is a, c, g, or t
  misc_feature (92)..(92): n is a, c, g, or t
  misc_feature (99)..(99): n is a, c, g, or t
  misc_feature (102)..(102): n is a, c, g, or t
  misc_feature (119)..(119): n is a, c, g, or t
  misc_feature (127)..(127): n is a, c, g, or t
  misc_feature (159)..(159): n is a, c, g, or t
  misc_feature (166)..(166): n is a, c, g, or t
  misc_feature (172)..(173): n is a, c, g, or t
  misc_feature (183)..(183): n is a, c, g, or t
  misc_feature (189)..(189): n is a, c, g, or t
  misc_feature (209)..(209): n is a, c, g, or t
gatnnnntanccnnggnctatnaacgttnccgangcaggtncgcnatgctntgnccttatnncatngcgaangagtaccngganancccncntggacanacntgagggcagccatgggnaggctganacaaaattctggttcactaatttccatctttnctttttntttatnngccaacacantaactntattggtactagaacatggnattacctttgggt

SEQ ID NO: 360 - DNA, 82 bp, Unknown Organism
  polynucleotide sequence showing no homology to known genes
  misc_feature (1)..(1): n is a, c, g, or t
  misc_feature (8)..(10): n is a, c, g, or t
  misc_feature (14)..(14): n is a, c, g, or t
  misc_feature (28)..(28): n is a, c, g, or t
  misc_feature (53)..(53): n is a, c, g, or t
  misc_feature (55)..(56): n is a, c, g, or t
  misc_feature (66)..(66): n is a, c, g, or t
  misc_feature (71)..(71): n is a, c, g, or t
  misc_feature (74)..(74): n is a, c, g, or t
  misc_feature (79)..(79): n is a, c, g, or t
  misc_feature (82)..(82): n is a, c, g, or t
nacgcagnnnaaanacgatgacgaaagnccgccaaaaccactgacttgacacntnnaagattgctngggancanaggangcn

SEQ ID NO: 361 - DNA, 98 bp, Unknown Organism
  polynucleotide sequence showing no homology to known genes
  misc_feature (4)..(5): n is a, c, g, or t
  misc_feature (9)..(9): n is a, c, g, or t
  misc_feature (25)..(25): n is a, c, g, or t
  misc_feature (36)..(36): n is a, c, g, or t
  misc_feature (39)..(39): n is a, c, g, or t
  misc_feature (45)..(45): n is a, c, g, or t
  misc_feature (48)..(48): n is a, c, g, or t
  misc_feature (65)..(65): n is a, c, g, or t
  misc_feature (70)..(70): n is a, c, g, or t
  misc_feature (76)..(76): n is a, c, g, or t
  misc_feature (92)..(92): n is a, c, g, or t
tgtnnaaanaaggcgtgccgaggcngacggatgtgncangtgtcncangacgatgttactgaatnggtanttacancgggaatctgtggcgntcatgc

SEQ ID NO: 362 - DNA, 44 bp, Unknown Organism
  polynucleotide sequence showing no homology to known genes
  misc_feature (4)..(4): n is a, c, g, or t
  misc_feature (10)..(10): n is a, c, g, or t
  misc_feature (18)..(18): n is a, c, g, or t
  misc_feature (23)..(23): n is a, c, g, or t
  misc_feature (27)..(27): n is a, c, g, or t
  misc_feature (30)..(30): n is a, c, g, or t
  misc_feature (32)..(32): n is a, c, g, or t
aagncggaangtttgtancccgnaccncananaaattcacattg

SEQ ID NO: 363 - DNA, 73 bp, Unknown Organism
  polynucleotide sequence showing no homology to known genes
  misc_feature (16)..(16): n is a, c, g, or t
ggagcacagcaattcnaaattctttctaccattttggtttcatatctaagtcattccctattgggcttgcgct

SEQ ID NO: 364 - DNA, 61 bp, Unknown Organism
  polynucleotide sequence showing no homology to known genes
  misc_feature (14)..(15): n is a, c, g, or t
  misc_feature (18)..(18): n is a, c, g, or t
  misc_feature (23)..(23): n is a, c, g, or t
  misc_feature (26)..(26): n is a, c, g, or t
  misc_feature (29)..(29): n is a, c, g, or t
  misc_feature (31)..(31): n is a, c, g, or t
  misc_feature (34)..(34): n is a, c, g, or t
  misc_feature (37)..(38): n is a, c, g, or t
  misc_feature (41)..(42): n is a, c, g, or t
  misc_feature (46)..(46): n is a, c, g, or t
  misc_feature (48)..(49): n is a, c, g, or t
  misc_feature (52)..(52): n is a, c, g, or t
gtgggatgctgacnntgnagctnttngtntngtnccnnagnnattncnngcnattaagcat

SEQ ID NO: 365 - DNA, 71 bp, Unknown Organism
  polynucleotide sequence showing no homology to known genes
  misc_feature (6)..(8): n is a, c, g, or t
  misc_feature (14)..(14): n is a, c, g, or t
  misc_feature (29)..(29): n is a, c, g, or t
  misc_feature (31)..(33): n is a, c, g, or t
  misc_feature (35)..(35): n is a, c, g, or t
  misc_feature (38)..(38): n is a, c, g, or t
  misc_feature (59)..(59): n is a, c, g, or t
cgctannntagcantccgatgtgagggangnnncnagnccccctctttatgaacttgantgctggcataca

SEQ ID NO: 366 - DNA, 85 bp, Unknown Organism
  polynucleotide sequence showing no homology to known genes
  misc_feature (2)..(2): n is a, c, g, or t
  misc_feature (11)..(11): n is a, c, g, or t
  misc_feature (16)..(17): n is a, c, g, or t
  misc_feature (30)..(30): n is a, c, g, or t
  misc_feature (41)..(44): n is a, c, g, or t
  misc_feature (48)..(48): n is a, c, g, or t
  misc_feature (50)..(50): n is a, c, g, or t
  misc_feature (59)..(59): n is a, c, g, or t
  misc_feature (64)..(64): n is a, c, g, or t
  misc_feature (82)..(82): n is a, c, g, or t
gnaaagctaangtgannattagcactctgntgggagggtannnnctanantcccctaantatgntacttaattggggccgtncat

SEQ ID NO: 367 - DNA, 85 bp, Unknown Organism
  polynucleotide sequence showing no homology to known genes
  misc_feature (8)..(9): n is a, c, g, or t
  misc_feature (12)..(12): n is a, c, g, or t
  misc_feature (15)..(15): n is a, c, g, or t
  misc_feature (17)..(17): n is a, c, g, or t
  misc_feature (20)..(20): n is a, c, g, or t
  misc_feature (26)..(27): n is a, c, g, or t
  misc_feature (30)..(30): n is a, c, g, or t
  misc_feature (34)..(34): n is a, c, g, or t
  misc_feature (36)..(37): n is a, c, g, or t
  misc_feature (47)..(47): n is a, c, g, or t
  misc_feature (51)..(52): n is a, c, g, or t
  misc_feature (63)..(63): n is a, c, g, or t
  misc_feature (76)..(76): n is a, c, g, or t
  misc_feature (78)..(78): n is a, c, g, or t
  misc_feature (80)..(80): n is a, c, g, or t
  misc_feature (85)..(85): n is a, c, g, or t
gccggctnntgnagngncgntgcttnnttnagtntnntgagcatggncctnnagaaaacgctngtggcatgatgcntnanggggn

SEQ ID NO: 368 - DNA, 106 bp, Unknown Organism
  polynucleotide sequence showing no homology to known genes
  misc_feature (1)..(3): n is a, c, g, or t
  misc_feature (26)..(26): n is a, c, g, or t
  misc_feature (37)..(37): n is a, c, g, or t
  misc_feature (44)..(44): n is a, c, g, or t
  misc_feature (51)..(51): n is a, c, g, or t
  misc_feature (60)..(61): n is a, c, g, or t
  misc_feature (72)..(72): n is a, c, g, or t
  misc_feature (75)..(75): n is a, c, g, or t
  misc_feature (89)..(89): n is a, c, g, or t
  misc_feature (91)..(91): n is a, c, g, or t
nnntatccctgctgtgaggagtgttnttccttgtgtnatgcctntatttgngtttccgcnnttgtgctcttntcntaatgtatagattntnactgtagattctcat

SEQ ID NO: 369 - DNA, 91 bp, Unknown Organism
  polynucleotide sequence showing no homology to known genes
  misc_feature (2)..(2): n is a, c, g, or t
  misc_feature (4)..(4): n is a, c, g, or t
  misc_feature (8)..(8): n is a, c, g, or t
  misc_feature (10)..(11): n is a, c, g, or t
  misc_feature (26)..(26): n is a, c, g, or t
  misc_feature (86)..(86): n is a, c, g, or t
  misc_feature (88)..(88): n is a, c, g, or t
gncnggtngnngaactaaagtaagtnggtaggcatggtggcgaatgaacctaaaaagtaaaatctaacttgcaggatcaaacatangntca

SEQ ID NO: 370 - DNA, 103 bp, Unknown Organism
  polynucleotide sequence showing no homology to known genes
  misc_feature (2)..(2): n is a, c, g, or t
  misc_feature (10)..(10): n is a, c, g, or t
  misc_feature (35)..(35): n is a, c, g, or t
  misc_feature (75)..(75): n is a, c, g, or t
  misc_feature (84)..(84): n is a, c, g, or t
cncattgtanatcaacctatatgatggacttacgngaagtttccaagacacatgactaaagctgaccaagtctantaggctagntcaagcccgtaccgtgaca

SEQ ID NO: 371 - DNA, 138 bp, Unknown Organism
  polynucleotide sequence showing no homology to known genes
  misc_feature (13)..(13): n is a, c, g, or t
  misc_feature (32)..(32): n is a, c, g, or t
  misc_feature (45)..(45): n is a, c, g, or t
  misc_feature (48)..(48): n is a, c, g, or t
  misc_feature (68)..(69): n is a, c, g, or t
  misc_feature (84)..(84): n is a, c, g, or t
  misc_feature (88)..(89): n is a, c, g, or t
  misc_feature (96)..(96): n is a, c, g, or t
  misc_feature (103)..(103): n is a, c, g, or t
  misc_feature (108)..(108): n is a, c, g, or t
  misc_feature (112)..(112): n is a, c, g, or t
  misc_feature (118)..(118): n is a, c, g, or t
  misc_feature (121)..(122): n is a, c, g, or t
  misc_feature (126)..(126): n is a, c, g, or t
  misc_feature (128)..(129): n is a, c, g, or t
tcgtatttatgcncatgaatgatgtgcagtgntgtgtcctgactnatnggagccgttgtcaaacatgnngtatgagtaggaagnattnnctgctcntctcggncatgnaggnagccanatnngtcngnnagtgcagat

SEQ ID NO: 372 - DNA, 124 bp, Unknown Organism
  polynucleotide sequence showing no homology to known genes
  misc_feature (1)..(1): n is a, c, g, or t
  misc_feature (6)..(6): n is a, c, g, or t
  misc_feature (8)..(9): n is a, c, g, or t
  misc_feature (11)..(11): n is a, c, g, or t
  misc_feature (15)..(15): n is a, c, g, or t
  misc_feature (18)..(22): n is a, c, g, or t
  misc_feature (31)..(31): n is a, c, g, or t
  misc_feature (36)..(36): n is a, c, g, or t
  misc_feature (38)..(38): n is a, c, g, or t
  misc_feature (43)..(44): n is a, c, g, or t
  misc_feature (52)..(52): n is a, c, g, or t
  misc_feature (54)..(54): n is a, c, g, or t
  misc_feature (64)..(64): n is a, c, g, or t
  misc_feature (67)..(67): n is a, c, g, or t
  misc_feature (74)..(75): n is a, c, g, or t
  misc_feature (78)..(78): n is a, c, g, or t
  misc_feature (80)..(80): n is a, c, g, or t
  misc_feature (85)..(86): n is a, c, g, or t
  misc_feature (88)..(91): n is a, c, g, or t
  misc_feature (94)..(94): n is a, c, g, or t
  misc_feature (103)..(103): n is a, c, g, or t
  misc_feature (106)..(106): n is a, c, g, or t
  misc_feature (110)..(110): n is a, c, g, or t
  misc_feature (117)..(117): n is a, c, g, or t
  misc_feature (120)..(120): n is a, c, g, or t
ncgatncnnangacncannnnngcgaggtgngtaanantttgnnacctttantngctgcactanganatcgacnngcncngtganngnnnnacntgaggaaancanagcnggaatgnctnagta

SEQ ID NO: 373 - DNA, 66 bp, Unknown Organism
  polynucleotide sequence showing no homology to known genes
aatatggaactggaattatgtatctgtattactcctgttgtaatgcattgacttatacggccttgg

SEQ ID NO: 374 - DNA, 79 bp, Unknown Organism
  polynucleotide sequence showing no homology to known genes
  misc_feature (14)..(14): n is a, c, g, or t
gcttatagtgctgnatttatgctgataaattctgtaacataatagtgaggttgtaatgtagatgttgaagagctacctg

SEQ ID NO: 375 - DNA, 82 bp, Unknown Organism
  polynucleotide sequence showing no homology to known genes
  misc_feature (2)..(2): n is a, c, g, or t
  misc_feature (4)..(4): n is a, c, g, or t
  misc_feature (11)..(11): n is a, c, g, or t
  misc_feature (14)..(14): n is a, c, g, or t
  misc_feature (16)..(16): n is a, c, g, or t
  misc_feature (20)..(20): n is a, c, g, or t
  misc_feature (24)..(25): n is a, c, g, or t
gntnaagcagngtngntaanaggnngcattttctagtttcagatttttctgttcttggagcaataacatccatctttctcct

SEQ ID NO: 376 - DNA, 130 bp, Unknown Organism
  polynucleotide sequence showing no homology to known genes
  misc_feature (6)..(6): n is a, c, g, or t
ccgttnccctcaaacacccttgaatcctatcgaatctggatttgaagacgaaccctagaaattccaaaatcctaaatcgagtgttcgttgaatttttccagtctaaattgattttattcgtgtgttcttg

SEQ ID NO: 377 - DNA, 58 bp, Unknown Organism
  polynucleotide sequence showing no homology to known genes
  misc_feature (5)..(5): n is a, c, g, or t
  misc_feature (10)..(11): n is a, c, g, or t
  misc_feature (25)..(25): n is a, c, g, or t
  misc_feature (41)..(42): n is a, c, g, or t
  misc_feature (46)..(46): n is a, c, g, or t
  misc_feature (52)..(52): n is a, c, g, or t
tttgngatanntttagttggatggnatggaatgcttatctnntatncgaaangatggt

SEQ ID NO: 378 - DNA, 91 bp, Unknown Organism
  polynucleotide sequence showing no homology to known genes
  misc_feature (10)..(10): n is a, c, g, or t
  misc_feature (15)..(15): n is a, c, g, or t
  misc_feature (18)..(18): n is a, c, g, or t
  misc_feature (22)..(23): n is a, c, g, or t
  misc_feature (30)..(31): n is a, c, g, or t
  misc_feature (40)..(40): n is a, c, g, or t
  misc_feature (64)..(64): n is a, c, g, or t
  misc_feature (76)..(76): n is a, c, g, or t
  misc_feature (91)..(91): n is a, c, g, or t
ttgaataacnccagnatnggcnnaatacannccctaatancgaatgatctggtattttacaggnctgacggggggncgcccttttccgtgn

SEQ ID NO: 379 - DNA, 124 bp, Unknown Organism
  polynucleotide sequence showing no homology to known genes
  misc_feature (9)..(10): n is a, c, g, or t
  misc_feature (12)..(12): n is a, c, g, or t
  misc_feature (16)..(16): n is a, c, g, or t
  misc_feature (24)..(24): n is a, c, g, or t
  misc_feature (31)..(32): n is a, c, g, or t
  misc_feature (42)..(42): n is a, c, g, or t
  misc_feature (46)..(46): n is a, c, g, or t
  misc_feature (49)..(51): n is a, c, g, or t
  misc_feature (63)..(63): n is a, c, g, or t
  misc_feature (69)..(69): n is a, c, g, or t
  misc_feature (73)..(73): n is a, c, g, or t
  misc_feature (80)..(81): n is a, c, g, or t
  misc_feature (84)..(84): n is a, c, g, or t
  misc_feature (87)..(87): n is a, c, g, or t
  misc_feature (95)..(95): n is a, c, g, or t
  misc_feature (102)..(102): n is a, c, g, or t
  misc_feature (106)..(106): n is a, c, g, or t
  misc_feature (116)..(116): n is a, c, g, or t
tgcttgtannangccnatgctgtntggtggnncgcgcacgtngtgntcnnntgagaggacatntctganttgngccaggnnccngangaagactnccgatanttantgccgaggcncatggggg

SEQ ID NO: 380 - DNA, 125 bp, Unknown Organism
  polynucleotide sequence showing no homology to known genes
  misc_feature (2)..(2): n is a, c, g, or t
  misc_feature (39)..(39): n is a, c, g, or t
tntagacccgttttatacaaagcccaaggactgagactntgtacagttgcggaatctgcttgaccccttttacatggttgatacttgtaaccaaacagaacatgctgaaggtgcaaaaggtggag

SEQ ID NO: 381 - DNA, 58 bp, Unknown Organism
  polynucleotide sequence showing no homology to known genes
  misc_feature (1)..(1): n is a, c, g, or t
  misc_feature (15)..(15): n is a, c, g, or t
  misc_feature (26)..(26): n is a, c, g, or t
  misc_feature (31)..(32): n is a, c, g, or t
  misc_feature (45)..(45): n is a, c, g, or t
  misc_feature (47)..(49): n is a, c, g, or t
  misc_feature (55)..(55): n is a, c, g, or t
ngcacggccctcggncttgcaaaaangtggnnacaccctcggggncnnngccagnggg

SEQ ID NO: 382 - DNA, 69 bp, Unknown Organism
  polynucleotide sequence showing no homology to known genes
  misc_feature (5)..(5): n is a, c, g, or t
  misc_feature (7)..(8): n is a, c, g, or t
  misc_feature (43)..(43): n is a, c, g, or t
  misc_feature (54)..(54): n is a, c, g, or t
actcnanncccgcgtgctcgcgccagctcccaatgcaaatggnatagaaaaatncaatgctgagcatcg

SEQ ID NO: 383 - DNA, 99 bp, Unknown Organism
  polynucleotide sequence showing no homology to known genes
  misc_feature (1)..(2): n is a, c, g, or t
  misc_feature (5)..(6): n is a, c, g, or t
  misc_feature (27)..(27): n is a, c, g, or t
  misc_feature (32)..(32): n is a, c, g, or t
  misc_feature (65)..(65): n is a, c, g, or t
  misc_feature (68)..(68): n is a, c, g, or t
  misc_feature (79)..(79): n is a, c, g, or t
nnctnnaatgtagctagtacaagtggnagtgngctacacaatatagcttgaccccgacaaaaatnctncacgcactagnaactcatgacatggtatacg

SEQ ID NO: 384 - DNA, 42 bp, Unknown Organism
  polynucleotide sequence showing no homology to known genes
  misc_feature (3)..(3): n is a, c, g, or t
  misc_feature (7)..(7): n is a, c, g, or t
  misc_feature (10)..(11): n is a, c, g, or t
  misc_feature (14)..(14): n is a, c, g, or t
  misc_feature (19)..(20): n is a, c, g, or t
  misc_feature (32)..(32): n is a, c, g, or t
  misc_feature (35)..(35): n is a, c, g, or t
  misc_feature (40)..(40): n is a, c, g, or t
cgnagcncgnncgnacacnncgacaaagggancgncacancc

SEQ ID NO: 385 - DNA, 132 bp, Unknown Organism
  polynucleotide sequence showing no homology to known genes
  misc_feature (10)..(10): n is a, c, g, or t
  misc_feature (21)..(21): n is a, c, g, or t
  misc_feature (26)..(26): n is a, c, g, or t
  misc_feature (28)..(28): n is a, c, g, or t
  misc_feature (31)..(31): n is a, c, g, or t
  misc_feature (35)..(35): n is a, c, g, or t
  misc_feature (74)..(74): n is a, c, g, or t
  misc_feature (81)..(81): n is a, c, g, or t
  misc_feature (84)..(84): n is a, c, g, or t
  misc_feature (109)..(109): n is a, c, g, or t
  misc_feature (111)..(111): n is a, c, g, or t
  misc_feature (115)..(115): n is a, c, g, or t
gccccctgtngctgctccctnagtgntnggncatncagtggtaagcatattggcctgcgccagcatactctaancatggtntgngatagaattccatcacgctactctngnggcncatgaagagcatatccg

SEQ ID NO: 386 - DNA, 155 bp, Unknown Organism
  polynucleotide sequence showing no homology to known genes
  misc_feature (1)..(1): n is a, c, g, or t
  misc_feature (13)..(13): n is a, c, g, or t
  misc_feature (32)..(34): n is a, c, g, or t
  misc_feature (36)..(37): n is a, c, g, or t
  misc_feature (79)..(79): n is a, c, g, or t
  misc_feature (83)..(83): n is a, c, g, or t
  misc_feature (139)..(139): n is a, c, g, or t
  misc_feature (141)..(141): n is a, c, g, or t
ntgtagctttctntgtaagcttatgtacctannngnncctgcaccgcccatggctgccggatctgatagctcccaaacnattngtttcaaccacaacccaattcttgccccaaaaccaaccacatcgtagcccaccagntntgttcttctctccg

SEQ ID NO: 387 - DNA, 120 bp, Unknown Organism
  polynucleotide sequence showing no homology to known genes
  misc_feature (1)..(1): n is a, c, g, or t
  misc_feature (4)..(4): n is a, c, g, or t
  misc_feature (23)..(23): n is a, c, g, or t
  misc_feature (31)..(31): n is a, c, g, or t
  misc_feature (35)..(35): n is a, c, g, or t
  misc_feature (37)..(37): n is a, c, g, or t
  misc_feature (42)..(42): n is a, c, g, or t
  misc_feature (70)..(70): n is a, c, g, or t
  misc_feature (77)..(77): n is a, c, g, or t
  misc_feature (94)..(94): n is a, c, g, or t
natnatctccgtgagaaaagacnctaatgantatngnttaancttatgccctatactcattcgacgactnacactgnaataaagccgagtaatngcaaatgcatttatttatactacacc

SEQ ID NO: 388 - DNA, 70 bp, Unknown Organism
  polynucleotide sequence showing no homology to known genes
  misc_feature (5)..(5): n is a, c, g, or t
  misc_feature (9)..(10): n is a, c, g, or t
  misc_feature (12)..(13): n is a, c, g, or t
  misc_feature (15)..(15): n is a, c, g, or t
  misc_feature (17)..(17): n is a, c, g, or t
  misc_feature (19)..(19): n is a, c, g, or t
  misc_feature (21)..(21): n is a, c, g, or t
  misc_feature (28)..(28): n is a, c, g, or t
  misc_feature (30)..(30): n is a, c, g, or t
  misc_feature (41)..(41): n is a, c, g, or t
  misc_feature (44)..(45): n is a, c, g, or t
ttgantacnntnnantncngnccttccntncaaacaacagnacnntgagaagccataaaaatacagctag

SEQ ID NO: 389 - DNA, 83 bp, Unknown Organism
  polynucleotide sequence showing no homology to known genes
  misc_feature (5)..(5): n is a, c, g, or t
  misc_feature (15)..(15): n is a, c, g, or t
  misc_feature (22)..(22): n is a, c, g, or t
  misc_feature (24)..(24): n is a, c, g, or t
  misc_feature (27)..(27): n is a, c, g, or t
  misc_feature (59)..(60): n is a, c, g, or t
  misc_feature (74)..(74): n is a, c, g, or t
  misc_feature (82)..(82): n is a, c, g, or t
gtgtntccttgtgtnatgcctntnttnttgtttccgctattgtactctcatcataatgnntaccatttttctgnagattctna

SEQ ID NO: 390 - DNA, 126 bp, Unknown Organism
  polynucleotide sequence showing no homology to known genes
  misc_feature (23)..(23): n is a, c, g, or t
  misc_feature (27)..(27): n is a, c, g, or t
  misc_feature (44)..(44): n is a, c, g, or t
  misc_feature (46)..(46): n is a, c, g, or t
  misc_feature (48)..(48): n is a, c, g, or t
cctcacgtggtctgggacagggnaccncgctgggctggggcatntnanggctcatatcgtggcagaggacatggcactacacgaggtggtcgcggtcgtggaagtagcagtttggggccgtgtcag

SEQ ID NO: 391 - DNA, 130 bp, Unknown Organism
  polynucleotide sequence showing no homology to known genes
  misc_feature (10)..(10): n is a, c, g, or t
  misc_feature (20)..(20): n is a, c, g, or t
  misc_feature (44)..(44): n is a, c, g, or t
ggcctggtcngtgtacttanacaaagtcccaaggactgagactntgtacagttgcggaatctgcttgaccccttttacatggttgatacttgtaaccaaacagaacatgctgaaggtgcaaaaggtggag

SEQ ID NO: 392 - DNA, 98 bp, Unknown Organism
  polynucleotide sequence showing no homology to known genes
  misc_feature (8)..(8): n is a, c, g, or t
  misc_feature (21)..(21): n is a, c, g, or t
  misc_feature (55)..(56): n is a, c, g, or t
  misc_feature (67)..(67): n is a, c, g, or t
  misc_feature (79)..(79): n is a, c, g, or t
  misc_feature (82)..(82): n is a, c, g, or t
  misc_feature (84)..(84): n is a, c, g, or t
  misc_feature (94)..(94): n is a, c, g, or t
  misc_feature (98)..(98): n is a, c, g, or t
cttagcancacagctgcttancacaaagataccagcccagggaagttgaatttgnntgtctacagcnaaagccattgcngangnaaagcccctngttn

SEQ ID NO: 393 - DNA, 120 bp, Unknown Organism
  polynucleotide sequence showing no homology to known genes
  misc_feature (11)..(11): n is a, c, g, or t
  misc_feature (23)..(23): n is a, c, g, or t
  misc_feature (25)..(25): n is a, c, g, or t
  misc_feature (34)..(34): n is a, c, g, or t
  misc_feature (39)..(39): n is a, c, g, or t
  misc_feature (44)..(44): n is a, c, g, or t
  misc_feature (57)..(57): n is a, c, g, or t
  misc_feature (65)..(65): n is a, c, g, or t
  misc_feature (68)..(68): n is a, c, g, or t
  misc_feature (78)..(78): n is a, c, g, or t
  misc_feature (90)..(91): n is a, c, g, or t
  misc_feature (93)..(93): n is a, c, g, or t
  misc_feature (95)..(95): n is a, c, g, or t
  misc_feature (102)..(102): n is a, c, g, or t
  misc_feature (113)..(113): n is a, c, g, or t
  misc_feature (115)..(115): n is a, c, g, or t
tacaaaacgtnttcattctttcnantaaatcttntattnttatnagagacatgggtngcccgttnganggagtactgntgttcttcctcnngntnagttgcngaatattgcantngctgc

SEQ ID NO: 394 - DNA, 112 bp, Unknown Organism
  polynucleotide sequence showing no homology to known genes
  misc_feature (18)..(18): n is a, c, g, or t
  misc_feature (22)..(22): n is a, c, g, or t
  misc_feature (30)..(30): n is a, c, g, or t
  misc_feature (56)..(56): n is a, c, g, or t
  misc_feature (89)..(90): n is a, c, g, or t
  misc_feature (93)..(93): n is a, c, g, or t
  misc_feature (103)..(103): n is a, c, g, or t
gctctacagaggacaagnactnatatctgnagacaagagggaattgcagcactcangatgtggtagaacggacaagggagtttcctctnntgntcaagtgatntctctcttc

SEQ ID NO: 395 - DNA, 94 bp, Unknown Organism
  polynucleotide sequence showing no homology to known genes
  misc_feature (5)..(5): n is a, c, g, or t
  misc_feature (7)..(7): n is a, c, g, or t
  misc_feature (15)..(15): n is a, c, g, or t
  misc_feature (28)..(28): n is a, c, g, or t
  misc_feature (35)..(36): n is a, c, g, or t
  misc_feature (38)..(38): n is a, c, g, or t
  misc_feature (40)..(40): n is a, c, g, or t
  misc_feature (50)..(51): n is a, c, g, or t
  misc_feature (54)..(54): n is a, c, g, or t
  misc_feature (58)..(58): n is a, c, g, or t
  misc_feature (60)..(60): n is a, c, g, or t
  misc_feature (63)..(63): n is a, c, g, or t
  misc_feature (74)..(76): n is a, c, g, or t
  misc_feature (79)..(79): n is a, c, g, or t
  misc_feature (85)..(86): n is a, c, g, or t
ccttngntaggccgncgaccttcagganaacctcnntncnggagaccgtnnctntcgncntgntgatggccatnnnttnaaacgnnttgtgatg

SEQ ID NO: 396 - DNA, 246 bp, Unknown Organism
  polynucleotide sequence showing no homology to known genes
  misc_feature (14)..(14): n is a, c, g, or t
tgtagtgaggagantgaggctgcagatgaggtggctggtaaaatctgtgatgaatttgattcaacggtagtgaatagtcatgtcaaaagactaccacttgctgatgtaactgattcatatctgaatcttcctgcttcaatctctgcagctgagaggtctcatgctaggggaagtctggattctgtcaagacagatgctagctgcactgggcatcataataaagccaaaagaaagcttggaagtagc

SEQ ID NO: 397 - DNA, 314 bp, Unknown Organism
  polynucleotide sequence showing no homology to known genes
  misc_feature (8)..(8): n is a, c, g, or t
  misc_feature (21)..(21): n is a, c, g, or t
  misc_feature (23)..(23): n is a, c, g, or t
  misc_feature (26)..(26): n is a, c, g, or t
  misc_feature (29)..(29): n is a, c, g, or t
  misc_feature (35)..(35): n is a, c, g, or t
  misc_feature (311)..(311): n is a, c, g, or t
  misc_feature (313)..(313): n is a, c, g, or t
gcaatctnaactcccgacttngntgngtnctgatntctgctgttgaatcggctgtttggtggctgaactcagaccatcattttggtccatttctttgatgttgttctgcttgtagttgtcctgaagtatttatggaagttgattcaagtctaatagtggcctttactctgcattttagctgtcctgaagaatttatggaagttgattcaagtcaaatagtggcctttactctgcattttaggtacgtacaggtcaactgtaattctctgttgcatttctaaatgaaaatatgggttatcttgtcatgtttngng

SEQ ID NO: 398 - DNA, 51 bp, Unknown Organism
  polynucleotide sequence showing no homology to known genes
  misc_feature (6)..(6): n is a, c, g, or t
  misc_feature (12)..(13): n is a, c, g, or t
  misc_feature (15)..(16): n is a, c, g, or t
  misc_feature (24)..(24): n is a, c, g, or t
  misc_feature (31)..(31): n is a, c, g, or t
  misc_feature (44)..(44): n is a, c, g, or t
ttttangcaagnntnncctcccangaacaancccttagtccagnttcaaag

SEQ ID NO: 399 - DNA, 141 bp, Unknown Organism
  polynucleotide sequence showing no homology to known genes
  misc_feature (6)..(6): n is a, c, g, or t
  misc_feature (10)..(10): n is a, c, g, or t
  misc_feature (25)..(25): n is a, c, g, or t
  misc_feature (27)..(27): n is a, c, g, or t
  misc_feature (32)..(32): n is a, c, g, or t
  misc_feature (36)..(36): n is a, c, g, or t
  misc_feature (44)..(44): n is a, c, g, or t
  misc_feature (46)..(46): n is a, c, g, or t
  misc_feature (49)..(49): n is a, c, g, or t
  misc_feature (53)..(53): n is a, c, g, or t
  misc_feature (56)..(56): n is a, c, g, or t
  misc_feature (58)..(63): n is a, c, g, or t
  misc_feature (68)..(68): n is a, c, g, or t
  misc_feature (70)..(72): n is a, c, g, or t
  misc_feature (76)..(76): n is a, c, g, or t
  misc_feature (78)..(78): n is a, c, g, or t
  misc_feature (81)..(81): n is a, c, g, or t
  misc_feature (84)..(84): n is a, c, g, or t
  misc_feature (89)..(89): n is a, c, g, or t
  misc_feature (94)..(94): n is a, c, g, or t
  misc_feature (105)..(105): n is a, c, g, or t
  misc_feature (129)..(129): n is a, c, g, or t
  misc_feature (133)..(133): n is a, c, g, or t
ttttangagnaactaaatccccttntnccgancccntgcaaaangnggnctanacngnnnnnntgagngnnnaatncnaanatnaaacnctgcnttcattctttncctactgatatgagactgtcaatnctgncagggcac

SEQ ID NO: 400 - DNA, 157 bp, Unknown Organism
  polynucleotide sequence showing no homology to known genes
  misc_feature (3)..(3): n is a, c, g, or t
  misc_feature (6)..(6): n is a, c, g, or t
  misc_feature (19)..(19): n is a, c, g, or t
  misc_feature (32)..(32): n is a, c, g, or t
  misc_feature (42)..(42): n is a, c, g, or t
  misc_feature (62)..(62): n is a, c, g, or t
  misc_feature (67)..(69): n is a, c, g, or t
  misc_feature (74)..(74): n is a, c, g, or t
  misc_feature (78)..(78): n is a, c, g, or t
  misc_feature (81)..(81): n is a, c, g, or t
  misc_feature (87)..(87): n is a, c, g, or t
  misc_feature (96)..(97): n is a, c, g, or t
  misc_feature (118)..(118): n is a, c, g, or t
  misc_feature (123)..(123): n is a, c, g, or t
  misc_feature (129)..(129): n is a, c, g, or t
  misc_feature (140)..(140): n is a, c, g, or t
ttnttnggctcgtcagggngattcttcctgcntatgctgatnatgagttgaccgatgttcantgttnnntaganctgnccnagtccnggcaatgtnncaagtatatagtggcactgcncggtnttatgncaacatcaatnctgcgaaaagcttcacc

SEQ ID NO: 401 - DNA, 273 bp, Unknown Organism
  polynucleotide sequence showing no homology to known genes
  misc_feature (1)..(3): n is a, c, g, or t
  misc_feature (8)..(8): n is a, c, g, or t
  misc_feature (16)..(16): n is a, c, g, or t
  misc_feature (26)..(26): n is a, c, g, or t
  misc_feature (41)..(41): n is a, c, g, or t
  misc_feature (44)..(44): n is a, c, g, or t
  misc_feature (46)..(46): n is a, c, g, or t
  misc_feature (57)..(57): n is a, c, g, or t
  misc_feature (59)..(59): n is a, c, g, or t
  misc_feature (69)..(69): n is a, c, g, or t
  misc_feature (78)..(79): n is a, c, g, or t
  misc_feature (85)..(85): n is a, c, g, or t
  misc_feature (106)..(106): n is a, c, g, or t
  misc_feature (109)..(109): n is a, c, g, or t
  misc_feature (112)..(112): n is a, c, g, or t
  misc_feature (122)..(122): n is a, c, g, or t
  misc_feature (126)..(127): n is a, c, g, or t
  misc_feature (142)..(142): n is a, c, g, or t
  misc_feature (146)..(146): n is a, c, g, or t
  misc_feature (149)..(149): n is a, c, g, or t
  misc_feature (151)..(151): n is a, c, g, or t
  misc_feature (160)..(161): n is a, c, g, or t
  misc_feature (168)..(168): n is a, c, g, or t
  misc_feature (170)..(171): n is a, c, g, or t
  misc_feature (174)..(174): n is a, c, g, or t
  misc_feature (179)..(179): n is a, c, g, or t
  misc_feature (181)..(181): n is a, c, g, or t
  misc_feature (183)..(183): n is a, c, g, or t
  misc_feature (185)..(186): n is a, c, g, or t
  misc_feature (192)..(192): n is a, c, g, or t
  misc_feature (248)..(248): n is a, c, g, or t
nnncactnctaaagcnctctcctaangacccccaagaggangcntntactagacatncnactcaggcgngatccgcanncctganccgcgtatagctggtatgatnggncanccaaggattntggnntacgagggccgttangtgnganangcacaatgnnggacaananntgnacctnangngnnacaacncaacccaaaggctaactatgcgaaccagacacacctactaacgctctactatgtgncacaagctgtgcggtacgacaaggc

SEQ ID NO: 402 - DNA, 33 bp, Unknown Organism
  polynucleotide sequence showing no homology to known genes
  misc_feature (1)..(1): n is a, c, g, or t
  misc_feature (15)..(15): n is a, c, g, or t
  misc_feature (18)..(18): n is a, c, g, or t
  misc_feature (25)..(25): n is a, c, g, or t
  misc_feature (27)..(27): n is a, c, g, or t
  misc_feature (29)..(29): n is a, c, g, or t
nggcgtggtggctgnaangggtctnangntgcc

SEQ ID NO: 403 - DNA, 49 bp, Unknown Organism
  polynucleotide sequence showing no homology to known genes
  misc_feature (9)..(9): n is a, c, g, or t
  misc_feature (21)..(21): n is a, c, g, or t
  misc_feature (26)..(26): n is a, c, g, or t
  misc_feature (37)..(37): n is a, c, g, or t
  misc_feature (44)..(44): n is a, c, g, or t
  misc_feature (46)..(47): n is a, c, g, or t
ttctcaggnaggcgggggtgncatcnctgaacaccanaggcagntnncc

SEQ ID NO: 404 - DNA, 48 bp, Unknown Organism
  polynucleotide sequence showing no homology to known genes
  misc_feature (15)..(15): n is a, c, g, or t
  misc_feature (27)..(27): n is a, c, g, or t
  misc_feature (31)..(31): n is a, c, g, or t
  misc_feature (38)..(38): n is a, c, g, or t
  misc_feature (43)..(43): n is a, c, g, or t
  misc_feature (46)..(46): n is a, c, g, or t
aacctcttttctagnaaccactctctnaatntgtggtnggcgnttnca

SEQ ID NO: 405 - DNA, 64 bp, Unknown Organism
  polynucleotide sequence showing no homology to known genes
  misc_feature (4)..(4): n is a, c, g, or t
  misc_feature (6)..(6): n is a, c, g, or t
  misc_feature (8)..(9): n is a, c, g, or t
  misc_feature (11)..(11): n is a, c, g, or t
  misc_feature (14)..(14): n is a, c, g, or t
  misc_feature (21)..(21): n is a, c, g, or t
  misc_feature (23)..(23): n is a, c, g, or t
  misc_feature (27)..(27): n is a, c, g, or t
  misc_feature (30)..(30): n is a, c, g, or t
  misc_feature (32)..(33): n is a, c, g, or t
  misc_feature (38)..(38): n is a, c, g, or t
  misc_feature (51)..(51): n is a, c, g, or t
  misc_feature (55)..(55): n is a, c, g, or t
  misc_feature (57)..(57): n is a, c, g, or t
accncnanncntcngaggganangccnacntnntggcngtgggcccggaantgtncnaatataa

SEQ ID NO: 406 - DNA, 243 bp, Unknown Organism
  polynucleotide sequence showing no homology to known genes
  misc_feature (11)..(11): n is a, c, g, or t
  misc_feature (14)..(15): n is a, c, g, or t
  misc_feature (27)..(29): n is a, c, g, or t
  misc_feature (31)..(31): n is a, c, g, or t
  misc_feature (35)..(37): n is a, c, g, or t
  misc_feature (43)..(43): n is a, c, g, or t
  misc_feature (50)..(51): n is a, c, g, or t
  misc_feature (53)..(53): n is a, c, g, or t
  misc_feature (61)..(61): n is a, c, g, or t
  misc_feature (65)..(65): n is a, c, g, or t
  misc_feature (67)..(67): n is a, c, g, or t
  misc_feature (69)..(70): n is a, c, g, or t
  misc_feature (72)..(72): n is a, c, g, or t
  misc_feature (75)..(75): n is a, c, g, or t
  misc_feature (78)..(78): n is a, c, g, or t
  misc_feature (82)..(84): n is a, c, g, or t
  misc_feature (86)..(86): n is a, c, g, or t
  misc_feature (90)..(90): n is a, c, g, or t
  misc_feature (98)..(98): n is a, c, g, or t
  misc_feature (105)..(105): n is a, c, g, or t
  misc_feature (108)..(108): n is a, c, g, or t
  misc_feature (110)..(110): n is a, c, g, or t
  misc_feature (112)..(112): n is a, c, g, or t
  misc_feature (118)..(118): n is a, c, g, or t
  misc_feature (121)..(121): n is a, c, g, or t
  misc_feature (123)..(123): n is a, c, g, or t
  misc_feature (129)..(130): n is a, c, g, or t
  misc_feature (133)..(136): n is a, c, g, or t
  misc_feature (141)..(144): n is a, c, g, or t
  misc_feature (146)..(147): n is a, c, g, or t
  misc_feature (151)..(151): n is a, c, g, or t
  misc_feature (153)..(153): n is a, c, g, or t
  misc_feature (155)..(155): n is a, c, g, or t
  misc_feature (162)..(162): n is a, c, g, or t
  misc_feature (164)..(164): n is a, c, g, or t
  misc_feature (169)..(169): n is a, c, g, or t
  misc_feature (171)..(171): n is a, c, g, or t
  misc_feature (175)..(175): n is a, c, g, or t
  misc_feature (191)..(191): n is a, c, g, or t
  misc_feature (197)..(197): n is a, c, g, or t
  misc_feature (204)..(204): n is a, c, g, or t
  misc_feature (230)..(230): n is a, c, g, or t
tgccggggttntcnnacaagaatgccnnncnctgnnncgtgtntgtctgnncncatatgcngganangnncntgnccnaaannngncatngtgccttncagtagnatnancngatcanctntnagagtnnccnnnncaggnnnncnncagntngntagtgtntntgctntngatntgaccttactataaanatgaancggcacnaccataaggtataaatgtaggcacantgcttgctctata

SEQ ID NO: 407 - DNA, 273 bp, Unknown Organism
  polynucleotide sequence showing no homology to known genes
  misc_feature (23)..(23): n is a, c, g, or t
  misc_feature (44)..(44): n is a, c, g, or t
  misc_feature (47)..(47): n is a, c, g, or t
  misc_feature (54)..(54): n is a, c, g, or t
  misc_feature (64)..(64): n is a, c, g, or t
  misc_feature (68)..(70): n is a, c, g, or t
  misc_feature (72)..(72): n is a, c, g, or t
  misc_feature (94)..(94): n is a, c, g, or t
  misc_feature (103)..(103): n is a, c, g, or t
  misc_feature (159)..(159): n is a, c, g, or t
ctcggtgaatgcaccatcctcanttcaaagtggttgctatggtntancagacancatatcggtnacannntncgaattgaacgaagaatttggnggtaaactntgtcagcagagcatgaatgctggtttgtctagtggagttgaggttattgatgtttntactcctccatgctacaaggtaagtggagacagcaagaaaagaagactttctacggcttgtcttgaaattattgatttgacagactcacctatttttgtctgatgtaactaata

SEQ ID NO: 408 - DNA, 37 bp, Unknown Organism
  polynucleotide sequence showing no homology to known genes
  misc_feature (4)..(4): n is a, c, g, or t
  misc_feature (18)..(18): n is a, c, g, or t
  misc_feature (20)..(20): n is a, c, g, or t
  misc_feature (27)..(27): n is a, c, g, or t
  misc_feature (32)..(32): n is a, c, g, or t
tganagaatgggttctantnaggaacnatgtnttgta

SEQ ID NO: 409 - DNA, 118 bp, Unknown Organism
  polynucleotide sequence showing no homology to known genes
  misc_feature (5)..(5): n is a, c, g, or t
  misc_feature (12)..(12): n is a, c, g, or t
  misc_feature (14)..(14): n is a, c, g, or t
  misc_feature (21)..(21): n is a, c, g, or t
  misc_feature (40)..(40): n is a, c, g, or t
  misc_feature (45)..(45): n is a, c, g, or t
  misc_feature (55)..(55): n is a, c, g, or t
  misc_feature (70)..(70): n is a, c, g, or t
  misc_feature (77)..(78): n is a, c, g, or t
  misc_feature (84)..(84): n is a, c, g, or t
actcncagttgngnggtgcgnagtaaacaactaacaagantgcgnaagcattcangaggacccactgtangcttatnncatctngatcaaaatcagaatgaagttatttctactcttg

SEQ ID NO: 410 - DNA, 75 bp, Unknown Organism
  polynucleotide sequence showing no homology to known genes
  misc_feature (4)..(4): n is a, c, g, or t
  misc_feature (20)..(20): n is a, c, g, or t
  misc_feature (24)..(24): n is a, c, g, or t
  misc_feature (40)..(40): n is a, c, g, or t
  misc_feature (51)..(51): n is a, c, g, or t
  misc_feature (55)..(55): n is a, c, g, or t
  misc_feature (66)..(66): n is a, c, g, or t
  misc_feature (72)..(72): n is a, c, g, or t
tggnagcgccgcgtagcganaggnactatagcctggggtngtatagacacntatnggctggcacancttctnaca

SEQ ID NO: 411 - DNA, 102 bp, Unknown Organism
  polynucleotide sequence showing no homology to known genes
  misc_feature (2)..(3): n is a, c, g, or t
  misc_feature (12)..(12): n is a, c, g, or t
  misc_feature (22)..(22): n is a, c, g, or t
  misc_feature (30)..(30): n is a, c, g, or t
  misc_feature (33)..(33): n is a, c, g, or t
  misc_feature (38)..(38): n is a, c, g, or t
  misc_feature (63)..(63): n is a, c, g, or t
  misc_feature (66)..(66): n is a, c, g, or t
  misc_feature (87)..(87): n is a, c, g, or t
  misc_feature (96)..(96): n is a, c, g, or t
  misc_feature (99)..(99): n is a, c, g, or t
tnncattgaatngccctacatntaccaatntgnaatcnactgatacttctcaaaacatatcantgncttgcccacttcattacgggnttgtatganaancca

SEQ ID NO: 412 - DNA, 256 bp, Unknown Organism
  polynucleotide sequence showing no homology to known genes
  misc_feature (15)..(15): n is a, c, g, or t
  misc_feature (23)..(23): n is a, c, g, or t
  misc_feature (30)..(30): n is a, c, g, or t
  misc_feature (40)..(40): n is a, c, g, or t
  misc_feature (49)..(49): n is a, c, g, or t
  misc_feature (67)..(68): n is a, c, g, or t
  misc_feature (75)..(75): n is a, c, g, or t
  misc_feature (85)..(85): n is a, c, g, or t
  misc_feature (97)..(97): n is a, c, g, or t
  misc_feature (99)..(99): n is a, c, g, or t
  misc_feature (104)..(104): n is a, c, g, or t
  misc_feature (134)..(134): n is a, c, g, or t
  misc_feature (173)..(173): n is a, c, g, or t
  misc_feature (179)..(179): n is a, c, g, or t
  misc_feature (182)..(182): n is a, c, g, or t
  misc_feature (186)..(186): n is a, c, g, or t
  misc_feature (192)..(192): n is a, c, g, or t
  misc_feature (197)..(197): n is a, c, g, or t
  misc_feature (222)..(222): n is a, c, g, or t
  misc_feature (254)..(254): n is a, c, g, or t
ttcccggcctggttnccctactnatactcnaccatacccnagaaacccntaacctaattcttcattnnctctccncatatcatcntcaaatactctntncacanattcgttccttctacaactccatcactttntccctctcgccaccgttccaagtattgcacatgggtganagctgnttnatgntctgtngctgngacagatgaacaacaccatatcgcnagtaatggactagtacacaaagaatatgctgncc

SEQ ID NO: 413 - DNA, 25 bp, Unknown Organism
  polynucleotide sequence showing no homology to known genes
  misc_feature (3)..(3): n is a, c, g, or t
  misc_feature (5)..(5): n is a, c, g, or t
  misc_feature (11)..(12): n is a, c, g, or t
ctnantggcgnnatcagtgctcaca

SEQ ID NO: 414 - DNA, 36 bp, Unknown Organism
  polynucleotide sequence showing no homology to known genes
  misc_feature (9)..(9): n is a, c, g, or t
  misc_feature (34)..(34): n is a, c, g, or t
gttcttttngcaactttgatcgggaaagggctcnca

SEQ ID NO: 415 - DNA, 74 bp, Unknown Organism
  polynucleotide sequence showing no homology to known genes
  misc_feature (1)..(1): n is a, c, g, or t
ntacttctgttttctttttgtgtcaaatattgtttgaactctgggttttctaccacgtgccacggtaccactga

SEQ ID NO: 416 - DNA, 127 bp, Unknown Organism
  polynucleotide sequence showing no homology to known genes
  misc_feature (69)..(69): n is a, c, g, or t
  misc_feature (77)..(77): n is a, c, g, or t
tgcaataatgaacaaagcaagatatcagtagtgatatctttgttttagagcatctttgtttagctgctntccactanctacaaaattgaatattgcaacatttgtaaccttatttttatcttggcaa

SEQ ID NO: 417 - DNA, 166 bp, Unknown Organism
  polynucleotide sequence showing no homology to known genes
  misc_feature (11)..(11): n is a, c, g, or t
  misc_feature (104)..(105): n is a, c, g, or t
tcccttgtttnatggagccgattactttatgagaatgctcagaaacttcaagcaatcgagacagataatcgcaggcaacgagcagctctggtgaccttacaggnnaaggtagatgctgttgcttacccaagaggaactctgggtgaaaaatacgtgcatacttcca

SEQ ID NO: 418 - DNA, 177 bp, Unknown Organism
  polynucleotide sequence showing no homology to known genes
  misc_feature (6)..(7): n is a, c, g, or t
  misc_feature (9)..(9): n is a, c, g, or t
  misc_feature (25)..(25): n is a, c, g, or t
  misc_feature (27)..(27): n is a, c, g, or t
  misc_feature (30)..(30): n is a, c, g, or t
  misc_feature (66)..(67): n is a, c, g, or t
  misc_feature (69)..(69): n is a, c, g, or t
  misc_feature (72)..(73): n is a, c, g, or t
  misc_feature (76)..(76): n is a, c, g, or t
  misc_feature (78)..(79): n is a, c, g, or t
  misc_feature (84)..(84): n is a, c, g, or t
  misc_feature (86)..(86): n is a, c, g, or t
  misc_feature (90)..(90): n is a, c, g, or t
  misc_feature (93)..(93): n is a, c, g, or t
  misc_feature (96)..(98): n is a, c, g, or t
  misc_feature (102)..(102): n is a, c, g, or t
  misc_feature (114)..(115): n is a, c, g, or t
  misc_feature (124)..(124): n is a, c, g, or t
  misc_feature (128)..(129): n is a, c, g, or t
  misc_feature (138)..(138): n is a, c, g, or t
  misc_feature (141)..(141): n is a, c, g, or t
  misc_feature (144)..(145): n is a, c, g, or t
  misc_feature (147)..(148): n is a, c, g, or t
  misc_feature (151)..(151): n is a, c, g, or t
  misc_feature (153)..(154): n is a, c, g, or t
  misc_feature (157)..(157): n is a, c, g, or t
accccnntntaaaggggccaaaggnanaanctgcaatcattattcgattgaaacaatcctgcgatnnanacnnganannctgananatgnctnaannnaaanatttgtgctgannggggtgctnttcnncatgaggantanatnntnncancnnctnaagcttctttccatactgga

SEQ ID NO: 419 - DNA, 48 bp, Unknown Organism
  polynucleotide sequence showing no homology to known genes
  misc_feature (14)..(14): n is a, c, g, or t
  misc_feature (21)..(21): n is a, c, g, or t
  misc_feature (41)..(41): n is a, c, g, or t
ttgcgtggcagttnggggcanaggcactggagacaagggcnactccaa

SEQ ID NO: 420 - DNA, 73 bp, Unknown Organism
  polynucleotide sequence showing no homology to known genes
aagcaaccttgaatcagactcctcactgatctctccttctcgtcactgtttctgtgtgtgtgtgtgtgtgtgt

SEQ ID NO: 421 - DNA, 194 bp, Unknown Organism
  polynucleotide sequence showing no homology to known genes
gaatatggaagattccgaaaaagtgtcaatagatggcaaaaatcacaatgggcatgcaaaatatagtttcaagaacacaaatcggaggaagatgtttggtcaccctgaaaaatttagttcagtggaaactgcgatgtctagaataaagaataagagtcatagaccagctgatagtgatggagagggtggaatgt

SEQ ID NO: 422 - DNA, 26 bp, Unknown Organism
  polynucleotide sequence showing no homology to known genes
  misc_feature (2)..(2): n is a, c, g, or t
  misc_feature (6)..(6): n is a, c, g, or t
  misc_feature (8)..(8): n is a, c, g, or t
  misc_feature (13)..(13): n is a, c, g, or t
  misc_feature (19)..(19): n is a, c, g, or t
  misc_feature (22)..(22): n is a, c, g, or t
tnaaananaatgnattccnctngggt

SEQ ID NO: 423 - DNA, 53 bp, Unknown Organism
  polynucleotide sequence showing no homology to known genes
  misc_feature (15)..(15): n is a, c, g, or t
gaattctttggtgtncatgcgaattacgcgttcagttcttattgggctcacgt

SEQ ID NO: 424 - DNA, 73 bp, Unknown Organism
  polynucleotide sequence showing no homology to known genes
  misc_feature (12)..(12): n is a, c, g, or t
  misc_feature (17)..(17): n is a, c, g, or t
  misc_feature (20)..(21): n is a, c, g, or t
  misc_feature (24)..(24): n is a, c, g, or t
  misc_feature (28)..(28): n is a, c, g, or t
  misc_feature (38)..(38): n is a, c, g, or t
aggatacaaaancgaanccnntgngtgnctacactgcngaactgcgtcgttgcagggtcttattgggctcagt

SEQ ID NO: 425 - DNA, 135 bp, Unknown Organism
  polynucleotide sequence showing no homology to known genes
  misc_feature (1)..(1): n is a, c, g, or t
naacaatttgaaataatatatttcgtcaatgcagcttgcaagctgcagagaggagagtcattatagtaactttataacttttgtttcagtttacaaaccttgtaaattttgaccatattgaagttctcccttcag

SEQ ID NO: 426 - DNA, 91 bp, Unknown Organism
  polynucleotide sequence showing no homology to known genes
  misc_feature (8)..(8): n is a, c, g, or t
  misc_feature (24)..(24): n is a, c, g, or t
  misc_feature (36)..(36): n is a, c, g, or t
  misc_feature (42)..(42): n is a, c, g, or t
  misc_feature (62)..(62): n is a, c, g, or t
  misc_feature (66)..(67): n is a, c, g, or t
  misc_feature (75)..(75): n is a, c, g, or t
gcacattntcacatctttactaanataagaagattnctgtancatctactaagatattgcanaatnntatcagcnagagtgttgacgccgc

SEQ ID NO: 427 - DNA, 194 bp, Unknown Organism
  polynucleotide sequence showing no homology to known genes
  misc_feature (20)..(20): n is a, c, g, or t
  misc_feature (25)..(25): n is a, c, g, or t
  misc_feature (27)..(27): n is a, c, g, or t
  misc_feature (29)..(29): n is a, c, g, or t
  misc_feature (44)..(44): n is a, c, g, or t
  misc_feature (46)..(46): n is a, c, g, or t
  misc_feature (55)..(56): n is a, c, g, or t
  misc_feature (60)..(61): n is a, c, g, or t
  misc_feature (67)..(67): n is a, c, g, or t
  misc_feature (72)..(72): n is a, c, g, or t
  misc_feature (74)..(74): n is a, c, g, or t
  misc_feature (80)..(80): n is a, c, g, or t
  misc_feature (82)..(86): n is a, c, g, or t
  misc_feature (90)..(90): n is a, c, g, or t
  misc_feature (92)..(92): n is a, c, g, or t
  misc_feature (96)..(97): n is a, c, g, or t
  misc_feature (99)..(100): n is a, c, g, or t
  misc_feature (102)..(102): n is a, c, g, or t
  misc_feature (105)..(105): n is a, c, g, or t
  misc_feature (111)..(111): n is a, c, g, or t
  misc_feature (114)..(115): n is a, c, g, or t
  misc_feature (137)..(137): n is a, c, g, or t
  misc_feature (144)..(144): n is a, c, g, or t
  misc_feature (156)..(156): n is a, c, g, or t
gagactttcaattgcgtgcntgctntnancaagccgcgagacantnctaatactnngacnngctggnaatgngncatctngnnnnnctantnaganncnnangcncacaangtnnactgtgtccttctggctgatgncttcccnagcattacgtgntgtctgcggcctgaataagatactgcctctgcaaatcc

SEQ ID NO: 428 - DNA, 280 bp, Unknown Organism
  polynucleotide sequence showing no homology to known genes
  misc_feature (7)..(7): n is a, c, g, or t
  misc_feature (14)..(14): n is a, c, g, or t
  misc_feature (35)..(36): n is a, c, g, or t
  misc_feature (56)..(56): n is a, c, g, or t
  misc_feature (58)..(59): n is a, c, g, or t
  misc_feature (61)..(61): n is a, c, g, or t
  misc_feature (64)..(64): n is a, c, g, or t
  misc_feature (68)..(68): n is a, c, g, or t
  misc_feature (70)..(70): n is a, c, g, or t
  misc_feature (73)..(73): n is a, c, g, or t
  misc_feature (79)..(82): n is a, c, g, or t
  misc_feature (89)..(89): n is a, c, g, or t
  misc_feature (92)..(92): n is a, c, g, or t
  misc_feature (100)..(100): n is a, c, g, or t
  misc_feature (103)..(103): n is a, c, g, or t
  misc_feature (105)..(106): n is a, c, g, or t
  misc_feature (109)..(109): n is a, c, g, or t
  misc_feature (112)..(112): n is a, c, g, or t
  misc_feature (114)..(114): n is a, c, g, or t
  misc_feature (122)..(125): n is a, c, g, or t
  misc_feature (127)..(127): n is a, c, g, or t
  misc_feature (132)..(133): n is a, c, g, or t
  misc_feature (135)..(135): n is a, c, g, or t
  misc_feature (140)..(140): n is a, c, g, or t
  misc_feature (147)..(147): n is a, c, g, or t
  misc_feature (149)..(150): n is a, c, g, or t
  misc_feature (153)..(153): n is a, c, g, or t
  misc_feature (162)..(162): n is a, c, g, or t
  misc_feature (165)..(166): n is a, c, g, or t
  misc_feature (168)..(168): n is a, c, g, or t
  misc_feature (171)..(172): n is a, c, g, or t
  misc_feature (178)..(178): n is a, c, g, or t
  misc_feature (196)..(197): n is a, c, g, or t
  misc_feature (199)..(199): n is a, c, g, or t
  misc_feature (201)..(201): n is a, c, g, or t
  misc_feature (203)..(203): n is a, c, g, or t
  misc_feature (209)..(209): n is a, c, g, or t
  misc_feature (217)..(217): n is a, c, g, or t
  misc_feature (220)..(220): n is a, c, g, or t
  misc_feature (222)..(222): n is a, c, g, or t
  misc_feature (225)..(225): n is a, c, g, or t
  misc_feature (234)..(234): n is a, c, g, or t
  misc_feature (237)..(237): n is a, c, g, or t
  misc_feature (244)..(244): n is a, c, g, or t
  misc_feature (247)..(247): n is a, c, g, or t
  misc_feature (253)..(253): n is a, c, g, or t
  misc_feature (257)..(257): n is a, c, g, or t
  misc_feature (277)..(277): n is a, c, g, or t
cctgctnattgganggagcactgagggtggtactnnttgcaggaaaatgcctgtcntnngnacncaantncangcccgnnnngcacgangtngatgcggnacnanngcngcntnatatctgnnnngnatcgnnangtgtnacacgcnannganagcaccggntanntnttnnatcctntgccggtgtacctttganntnanantcctcntgttaccngangncangtgcttctnctnagcttgntanttgaantggngtgagaatgaatgaccagcngct

SEQ ID NO: 429 - DNA, 19 bp, Unknown Organism
  polynucleotide sequence showing no homology to known genes
  misc_feature (1)..(1): n is a, c, g, or t
  misc_feature (4)..(4): n is a, c, g, or t
  misc_feature (6)..(6): n is a, c, g, or t
  misc_feature (18)..(18): n is a, c, g, or t
nagntntaattactcggnc

SEQ ID NO: 430 - DNA, 44 bp, Unknown Organism
  polynucleotide sequence showing no homology to known genes
  misc_feature (6)..(7): n is a, c, g, or t
  misc_feature (16)..(16): n is a, c, g, or t
  misc_feature (18)..(18): n is a, c, g, or t
  misc_feature (22)..(22): n is a, c, g, or t
ttttanncagtataantncctnccccttaaaccccccactggac

SEQ ID NO: 431 - DNA, 35 bp, Unknown Organism
  polynucleotide sequence showing no homology to known genes
  misc_feature (4)..(4): n is a, c, g, or t
  misc_feature (12)..(12): n is a, c, g, or t
tggnactttctnctcttcaaaagctttgactctct

SEQ ID NO: 432 - DNA, 46 bp, Unknown Organism
  polynucleotide sequence showing no homology to known genes
  misc_feature (8)..(10): n is a, c, g, or t
  misc_feature (14)..(14): n is a, c, g, or t
  misc_feature (30)..(30): n is a, c, g, or t
  misc_feature (37)..(37): n is a, c, g, or t
  misc_feature (40)..(40): n is a, c, g, or t
  misc_feature (44)..(44): n is a, c, g, or t
tgtgcgcnnngtgnatgtatatgtggtctnggctctnagnctgnct

SEQ ID NO: 433 - DNA, 51 bp, Unknown Organism
  polynucleotide sequence showing no homology to known genes
  misc_feature (31)..(31): n is a, c, g, or t
tgcagcttggggaagaccaggatatgagcgncggagtgagccactccatat

SEQ ID NO: 434 - DNA, 61 bp, Unknown Organism
  polynucleotide sequence showing no homology to known genes
gacaacaccatcaggtacaatggccaagtcgcaggcactgggagacgtaccaagttaggat

SEQ ID NO: 435 - DNA, 91 bp, Unknown Organism
  polynucleotide sequence showing no homology to known genes
  misc_feature (10)..(10): n is a, c, g, or t
  misc_feature (26)..(26): n is a, c, g, or t
  misc_feature (38)..(38): n is a, c, g, or t
  misc_feature (48)..(48): n is a, c, g, or t
  misc_feature (52)..(52): n is a, c, g, or t
  misc_feature (61)..(61): n is a, c, g, or t
  misc_feature (68)..(68): n is a, c, g, or t
  misc_feature (74)..(74): n is a, c, g, or t
tgaactaganatgtcattctatagcnagtattcagccngtgctgtgtnttancataatatnaagaatntttctnacttacgtgcaggggat

SEQ ID NO: 436 - DNA, 84 bp, Unknown Organism
  polynucleotide sequence showing no homology to known genes
  misc_feature (1)..(1): n is a, c, g, or t
natagaggaggacccatctgactcccgtcttcttcttcattagaaatgggaatcaacatccacgaacaaaaatgctatcgctat

SEQ ID NO: 437 - DNA, 66 bp, Unknown Organism
  polynucleotide sequence showing no homology to known genes
  misc_feature (26)..(26): n is a, c, g, or t
  misc_feature (30)..(30): n is a, c, g, or t
  misc_feature (35)..(35): n is a, c, g, or t
  misc_feature (40)..(40): n is a, c, g, or t
  misc_feature (47)..(47): n is a, c, g, or t
  misc_feature (50)..(50): n is a, c, g, or t
  misc_feature (53)..(53): n is a, c, g, or t
  misc_feature (61)..(61): n is a, c, g, or t
  misc_feature (65)..(65): n is a, c, g, or t
tcagcctcccggctttaacctactgngggnacagnatgtnggaaatnccngcnaagctggntggnt

SEQ ID NO: 438 - DNA, 128 bp, Unknown Organism
  polynucleotide sequence showing no homology to known genes
  misc_feature (3)..(4): n is a, c, g, or t
  misc_feature (9)..(9): n is a, c, g, or t
  misc_feature (22)..(22): n is a, c, g, or t
  misc_feature (39)..(39): n is a, c, g, or t
  misc_feature (103)..(105): n is a, c, g, or t
  misc_feature (116)..(117): n is a, c, g, or t
ggnnatgcncattggaaacacncgaatgaaacgtttctntgcgaaagtactcaccaacgagtgccattggaaagatttctatattgttatggaacgcctagannncaatacagtgnnacgcagcatct

SEQ ID NO: 439 - DNA, 33 bp, Unknown Organism
  polynucleotide sequence showing no homology to known genes
  misc_feature (14)..(14): n is a, c, g, or t
  misc_feature (21)..(21): n is a, c, g, or t
  misc_feature (24)..(24): n is a, c, g, or t
  misc_feature (32)..(32): n is a, c, g, or t
catctcgcaatgtnatccagngtnagctaacng

SEQ ID NO: 440 - DNA, 58 bp, Unknown Organism
  polynucleotide sequence showing no homology to known genes
  misc_feature (9)..(9): n is a, c, g, or t
  misc_feature (16)..(16): n is a, c, g, or t
  misc_feature (22)..(22): n is a, c, g, or t
  misc_feature (32)..(32): n is a, c, g, or t
  misc_feature (37)..(38): n is a, c, g, or t
  misc_feature (50)..(50): n is a, c, g, or t
  misc_feature (52)..(52): n is a, c, g, or t
tataatccngcactcncaggancgcaaatagntgtgnntgatggttattntngttatg

SEQ ID NO: 441 - DNA, 224 bp, Unknown Organism
  polynucleotide sequence showing no homology to known genes
  misc_feature (4)..(4): n is a, c, g, or t
  misc_feature (15)..(16): n is a, c, g, or t
  misc_feature (18)..(18): n is a, c, g, or t
  misc_feature (37)..(37): n is a, c, g, or t
accnaagatcccccnntnaaacacccaatcccccctntccggcaatgaagctgccggagctgacattgatctggccgatgttttcgccaagtacttgaaccaaggtacaacaaatgataatgatcatgatcaagataatattcttcaagaatctcccttggctgatcaagattattgttctattggagcaagcttatcaaattctccttcattagatagcttgg

SEQ ID NO: 442 - DNA, 65 bp, Unknown Organism
  polynucleotide sequence showing no homology to known genes
  misc_feature (5)..(5): n is a, c, g, or t
  misc_feature (9)..(9): n is a, c, g, or t
  misc_feature (13)..(14): n is a, c, g, or t
  misc_feature (35)..(37): n is a, c, g, or t
  misc_feature (49)..(49): n is a, c, g, or t
accanaacncaanngaaagggcccctacttatagnnnccaaggaggagnacaagttactgattgg

SEQ ID NO: 443 - DNA, 65 bp, Unknown Organism
  polynucleotide sequence showing no homology to known genes
  misc_feature (26)..(26): n is a, c, g, or t
  misc_feature (32)..(32): n is a, c, g, or t
  misc_feature (35)..(35): n is a, c, g, or t
  misc_feature (55)..(55): n is a, c, g, or t
  misc_feature (64)..(64): n is a, c, g, or t
ctattaaatacctccgggttttaaanaccacncgnctatattaccggttccgaancattgtgcng

SEQ ID NO: 444 - DNA, 53 bp, Unknown Organism
  polynucleotide sequence showing no homology to known genes
  misc_feature (1)..(1): n is a, c, g, or t
  misc_feature (3)..(3): n is a, c, g, or t
  misc_feature (20)..(20): n is a, c, g, or t
  misc_feature (27)..(27): n is a, c, g, or t
  misc_feature (45)..(45): n is a, c, g, or t
  misc_feature (49)..(49): n is a, c, g, or t
ncncggaaaggccccccttngtggggnaaacgacccggactctcnggcngccc

SEQ ID NO: 445 - DNA, 85 bp, Unknown Organism
  polynucleotide sequence showing no homology to known genes
gtaagggtaaggtcttcgctacaactacagtcgtttggtgggtaacaaccatcaataacattatcatccttctcaatcttagccg

SEQ ID NO: 446 - DNA, 157 bp, Unknown Organism
  polynucleotide sequence showing no homology to known genes
  misc_feature (4)..(4): n is a, c, g, or t
  misc_feature (8)..(8): n is a, c, g, or t
  misc_feature (16)..(16): n is a, c, g, or t
  misc_feature (22)..(22): n is a, c, g, or t
  misc_feature (35)..(35): n is a, c, g, or t
  misc_feature (43)..(43): n is a, c, g, or t
  misc_feature (45)..(45): n is a, c, g, or t
  misc_feature (60)..(60): n is a, c, g, or t
  misc_feature (63)..(63): n is a, c, g, or t
  misc_feature (67)..(67): n is a, c, g, or t
  misc_feature (69)..(71): n is a, c, g, or t
  misc_feature (74)..(74): n is a, c, g, or t
  misc_feature (89)..(89): n is a, c, g, or t
  misc_feature (95)..(95): n is a, c, g, or t
  misc_feature (97)..(97): n is a, c, g, or t
  misc_feature (99)..(99): n is a, c, g, or t
  misc_feature (119)..(119): n is a, c, g, or t
  misc_feature (141)..(141): n is a, c, g, or t
  misc_feature (151)..(152): n is a, c, g, or t
  misc_feature (156)..(156): n is a, c, g, or t
tctntggnaaagcccntgaganattgggaaaactnaacaaacngntaagcagcaggaganccnacangnnnagngaggccatttttttncgacancngngataacaaaaggaagcaggnggcaaattcgagctcagacacngaaaaccagnntctna

SEQ ID NO: 447 - DNA, 125 bp, Unknown Organism
  polynucleotide sequence showing no homology to known genes
  misc_feature (7)..(7): n is a, c, g, or t
  misc_feature (9)..(9): n is a, c, g, or t
  misc_feature (13)..(13): n is a, c, g, or t
  misc_feature (39)..(39): n is a, c, g, or t
  misc_feature (45)..(45): n is a, c, g, or t
  misc_feature (52)..(53): n is a, c, g, or t
  misc_feature (60)..(60): n is a, c, g, or t
  misc_feature (66)..(68): n is a, c, g, or t
  misc_feature (86)..(86): n is a, c, g, or t
  misc_feature (99)..(99): n is a, c, g, or t
  misc_feature (105)..(105): n is a, c, g, or t
  misc_feature (112)..(112): n is a, c, g, or t
  misc_feature (115)..(115): n is a, c, g, or t
  misc_feature (123)..(123): n is a, c, g, or t
actggcntntgcnagcgttaggttgctggttgtcctttncttttncactatnntttttgngctgtnnntcttcaccgtttagggancattacccagttncaaaancagctcngtnacatccgncg

SEQ ID NO: 448 - DNA, 127 bp, Unknown Organism
  polynucleotide sequence showing no homology to known genes
ctcggcataatcgtgcgttatatcgctggtagtccgaaacattcacaagattatttttctgctgatgctcggcatattatatggattctttattcatcgatattggcacttgatattttctgagtcg

SEQ ID NO: 449 - DNA, 19 bp, Unknown Organism
  polynucleotide sequence showing no homology to known genes
  misc_feature (1)..(1): n is a, c, g, or t
nccgcagagtccctgcagc

SEQ ID NO: 450 - DNA, 30 bp, Unknown Organism
  polynucleotide sequence showing no homology to known genes
  misc_feature (4)..(4): n is a, c, g, or t
  misc_feature (10)..(10): n is a, c, g, or t
  misc_feature (29)..(29): n is a, c, g, or t
ggtnttgganctccattctctattagccng

SEQ ID NO: 451 - DNA, 85 bp, Unknown Organism
  polynucleotide sequence showing no homology to known genes
  misc_feature (8)..(8): n is a, c, g, or t
  misc_feature (12)..(12): n is a, c, g, or t
  misc_feature (19)..(20): n is a, c, g, or t
  misc_feature (34)..(35): n is a, c, g, or t
  misc_feature (37)..(37): n is a, c, g, or t
  misc_feature (40)..(40): n is a, c, g, or t
  misc_feature (43)..(43): n is a, c, g, or t
  misc_feature (45)..(47): n is a, c, g, or t
  misc_feature (57)..(57): n is a, c, g, or t
  misc_feature (59)..(59): n is a, c, g, or t
  misc_feature (61)..(61): n is a, c, g, or t
  misc_feature (66)..(66): n is a, c, g, or t
  misc_feature (74)..(74): n is a, c, g, or t
  misc_feature (77)..(77): n is a, c, g, or t
  misc_feature (82)..(82): n is a, c, g, or t
aaggtgangtcncaaaganntgaccggggcctgnntntgntcngnnnacaggcatancngnagacngaagcgangangactnaag

SEQ ID NO: 452 - DNA, 152 bp, Unknown Organism
  polynucleotide sequence showing no homology to known genes
  misc_feature (3)..(3): n is a, c, g, or t
  misc_feature (12)..(12): n is a, c, g, or t
  misc_feature (18)..(18): n is a, c, g, or t
  misc_feature (41)..(41): n is a, c, g, or t
cangtgcaagantgttcntcgaatatttttgtattatatangcaaatagtaaccccacacctactagttgtttctaattttcattttcttttcatttgttactgtttcgatttttttcttaccatgttggataaataatgtgttgactataa

SEQ ID NO: 453 - DNA, 172 bp, Unknown Organism
  polynucleotide sequence showing no homology to known genes
  misc_feature (3)..(4): n is a, c, g, or t
  misc_feature (11)..(13): n is a, c, g, or t
  misc_feature (28)..(28): n is a, c, g, or t
  misc_feature (31)..(31): n is a, c, g, or t
  misc_feature (36)..(36): n is a, c, g, or t
  misc_feature (49)..(49): n is a, c, g, or t
  misc_feature (54)..(55): n is a, c, g, or t
  misc_feature (57)..(57): n is a, c, g, or t
  misc_feature (61)..(61): n is a, c, g, or t
  misc_feature (63)..(64): n is a, c, g, or t
  misc_feature (71)..(71): n is a, c, g, or t
  misc_feature (77)..(77): n is a, c, g, or t
  misc_feature (83)..(83): n is a, c, g, or t
  misc_feature (85)..(85): n is a, c, g, or t
  misc_feature (94)..(94): n is a, c, g, or t
  misc_feature (113)..(113): n is a, c, g, or t
  misc_feature (125)..(125): n is a, c, g, or t
  misc_feature (127)..(127): n is a, c, g, or t
  misc_feature (150)..(150): n is a, c, g, or t
  misc_feature (163)..(163): n is a, c, g, or t
tcnntgagctnnnttgcagcttctagcnganctttntttgcagcgtctngcagnngntttntnngccatgnttgttnttcctntncatagcccngtgtatttttggctatgancctgctctagtntncatctgccttcagcgtgagcctngtcaactacattnttcttggaa

SEQ ID NO: 454 - DNA, 188 bp, Unknown Organism
  polynucleotide sequence showing no homology to known genes
  misc_feature (1)..(1): n is a, c, g, or t
  misc_feature (4)..(4): n is a, c, g, or t
  misc_feature (88)..(88): n is a, c, g, or t
ntgnggagcatgagtttattgcgtttgatggttcacatgctaagtctgaatacatttacaccgttttagataacctagtcggtcaaanacaacacattactatttttccagatgctgattctttagttcttgagaatagctgaaagtaatcagagtttagatatgctgaacttccaatacagccttag

SEQ ID NO: 455 - DNA, 234 bp, Unknown Organism
  polynucleotide sequence showing no homology to known genes
  misc_feature (19)..(19): n is a, c, g, or t
  misc_feature (25)..(25): n is a, c, g, or t
  misc_feature (46)..(46): n is a, c, g, or t
  misc_feature (48)..(48): n is a, c, g, or t
  misc_feature (52)..(53): n is a, c, g, or t
  misc_feature (65)..(65): n is a, c, g, or t
  misc_feature (77)..(77): n is a, c, g, or t
  misc_feature (99)..(99): n is a, c, g, or t
  misc_feature (102)..(102): n is a, c, g, or t
  misc_feature (104)..(104): n is a, c, g, or t
  misc_feature (106)..(107): n is a, c, g, or t
  misc_feature (110)..(110): n is a, c, g, or t
  misc_feature (113)..(114): n is a, c, g, or t
  misc_feature (117)..(118): n is a, c, g, or t
  misc_feature (120)..(120): n is a, c, g, or t
  misc_feature (125)..(125): n is a, c, g, or t
  misc_feature (127)..(129): n is a, c, g, or t
  misc_feature (132)..(132): n is a, c, g, or t
  misc_feature (142)..(143): n is a, c, g, or t
  misc_feature (150)..(151): n is a, c, g, or t
  misc_feature (158)..(158): n is a, c, g, or t
  misc_feature (160)..(160): n is a, c, g, or t
  misc_feature (164)..(164): n is a, c, g, or t
  misc_feature (168)..(168): n is a, c, g, or t
  misc_feature (173)..(174): n is a, c, g, or t
  misc_feature (181)..(181): n is a, c, g, or t
  misc_feature (183)..(183): n is a, c, g, or t
  misc_feature (188)..(188): n is a, c, g, or t
  misc_feature (197)..(197): n is a, c, g, or t
  misc_feature (199)..(199): n is a, c, g, or t
  misc_feature (224)..(224): n is a, c, g, or t
  misc_feature (232)..(232): n is a, c, g, or t
gatggcaaagcaacattgnacaggntgaggactactagaatattanangctnntattgggtaggncatacgttggtnctgtgaaagggaatcaatgccntgntntnnctngcnnganntngagcntnnnggngcacaaatgnnctataannagccctntnatgnaggnggagnncacaagngnaggangtgatgccnanctgacctagcttgtgtaacacaggntcattganag

SEQ ID NO: 456 - DNA, 276 bp, Unknown Organism
  polynucleotide sequence showing no homology to known genes
caaagagtgaggaaaaatggaaactgattgcgtggtgctaccgtttcacacggtatacatgaaaagaaatcaagtcaggtattttgacagtgaggattcataacaaacaacaagatcatatactctgaagtagccgaatccagggagctgttgatctgatctcgatccccagcagcgtgcaggtgactaacaaagctaaaaaccaactctattcaagagctggaggtgcttcaacataataagtaagggctgttcattcttgattctttcaattag

SEQ ID NO: 457 - DNA, 33 bp, Unknown Organism
  polynucleotide sequence showing no homology to known genes
  misc_feature (20)..(20): n is a, c, g, or t
  misc_feature (25)..(25): n is a, c, g, or t
ctttgccacattctcggcgncactngtaagtag

SEQ ID NO: 458 - DNA, 73 bp, Unknown Organism
  polynucleotide sequence showing no homology to known genes
  misc_feature (3)..(3): n is a, c, g, or t
  misc_feature (7)..(7): n is a, c, g, or t
  misc_feature (9)..(9): n is a, c, g, or t
  misc_feature (14)..(14): n is a, c, g, or t
  misc_feature (21)..(21): n is a, c, g, or t
  misc_feature (31)..(31): n is a, c, g, or t
  misc_feature (34)..(34): n is a, c, g, or t
  misc_feature (43)..(44): n is a, c, g, or t
  misc_feature (48)..(48): n is a, c, g, or t
  misc_feature (51)..(51): n is a, c, g, or t
  misc_feature (53)..(53): n is a, c, g, or t
  misc_feature (55)..(55): n is a, c, g, or t
  misc_feature (59)..(59): n is a, c, g, or t
  misc_feature (61)..(61): n is a, c, g, or t
  misc_feature (69)..(69): n is a, c, g, or t
  misc_feature (71)..(71): n is a, c, g, or t
tgngcananaacanaggactnaggcaagcgntantatgggganngganccnangnggcncntcaagtgnantc

SEQ ID NO: 459 - DNA, 84 bp, Unknown Organism
  polynucleotide sequence showing no homology to known genes
  misc_feature (46)..(46): n is a, c, g, or t
  misc_feature (48)..(48): n is a, c, g, or t
ccccgatgccttcagtagacagaagctcactgctgttgcaccaatntncaccccgatgactctgccagagggcgaactagttgc

SEQ ID NO: 460 - DNA, 127 bp, Unknown Organism
  polynucleotide sequence showing no homology to known genes
  misc_feature (1)..(1): n is a, c, g, or t
  misc_feature (30)..(30): n is a, c, g, or t
  misc_feature (38)..(38): n is a, c, g, or t
  misc_feature (49)..(49): n is a, c, g, or t
  misc_feature (51)..(51): n is a, c, g, or t
  misc_feature (58)..(58): n is a, c, g, or t
  misc_feature (60)..(60): n is a, c, g, or t
  misc_feature (75)..(76): n is a, c, g, or t
  misc_feature (79)..(79): n is a, c, g, or t
  misc_feature (84)..(85): n is a, c, g, or t
  misc_feature (88)..(88): n is a, c, g, or t
  misc_feature (92)..(92): n is a, c, g, or t
  misc_feature (106)..(106): n is a, c, g, or t
  misc_feature (116)..(117): n is a, c, g, or t
  misc_feature (119)..(119): n is a, c, g, or t
  misc_feature (121)..(121): n is a, c, g, or t
nccggagaaaaggtcgaaaccgaccgtagntaggactnagtttctcttncngaaagancntgatcgggctctagnncanaaccnnggntttnaatatataataganaaacttcttnngnangttatg

SEQ ID NO: 461 - DNA, 201 bp, Unknown Organism
  polynucleotide sequence showing no homology to known genes
  misc_feature (7)..(7): n is a, c, g, or t
  misc_feature (16)..(16): n is a, c, g, or t
  misc_feature (20)..(20): n is a, c, g, or t
  misc_feature (23)..(23): n is a, c, g, or t
  misc_feature (27)..(27): n is a, c, g, or t
  misc_feature (34)..(34): n is a, c, g, or t
  misc_feature (39)..(39): n is a, c, g, or t
  misc_feature (43)..(43): n is a, c, g, or t
  misc_feature (51)..(51): n is a, c, g, or t
  misc_feature (53)..(53): n is a, c, g, or t
  misc_feature (56)..(58): n is a, c, g, or t
  misc_feature (61)..(61): n is a, c, g, or t
  misc_feature (69)..(69): n is a, c, g, or t
  misc_feature (76)..(77): n is a, c, g, or t
  misc_feature (83)..(83): n is a, c, g, or t
  misc_feature (107)..(107): n is a, c, g, or t
  misc_feature (122)..(122): n is a, c, g, or t
  misc_feature (125)..(125): n is a, c, g, or t
  misc_feature (135)..(135): n is a, c, g, or t
  misc_feature (140)..(140): n is a, c, g, or t
  misc_feature (142)..(143): n is a, c, g, or t
  misc_feature (149)..(151): n is a, c, g, or t
  misc_feature (157)..(157): n is a, c, g, or t
  misc_feature (160)..(160): n is a, c, g, or t
  misc_feature (170)..(170): n is a, c, g, or t
  misc_feature (179)..(179): n is a, c, g, or t
  misc_feature (190)..(190): n is a, c, g, or t
  misc_feature (193)..(193): n is a, c, g, or t
  misc_feature (195)..(197): n is a, c, g, or t
  misc_feature (201)..(201): n is a, c, g, or t
tgagganaaagaaggntacngcncttnccgatgnacacncagnaggatgancnatnnnacngactctcnatgctgnncgatgnccagaaggtgagcaactggaagantttcttctgtttttngtncttacatatntgaanannaatcannnaagtangancactaaaacnaacccatantggtccataanctntnnncctn

SEQ ID NO: 462 - DNA, 110 bp, Unknown Organism
  polynucleotide sequence showing no homology to known genes
gggtaattcaacagtgtagatttttttctagcttttgtagcaaatgaatttttttgatctgttgttgtactgtatccaaaaacaaaaatgttgttcaatgaaagatgaac

SEQ ID NO: 463 - DNA, 47 bp, Unknown Organism
  polynucleotide sequence showing no homology to known genes
  misc_feature (5)..(5): n is a, c, g, or t
tcaangaagctctcaccagtctccattagtagagtctataattatgc

SEQ ID NO: 464 - DNA, 121 bp, Unknown Organism
  polynucleotide sequence showing no homology to known genes
  misc_feature (6)..(8): n is a, c, g, or t
  misc_feature (14)..(14): n is a, c, g, or t
  misc_feature (18)..(18): n is a, c, g, or t
  misc_feature (20)..(20): n is a, c, g, or t
  misc_feature (22)..(22): n is a, c, g, or t
  misc_feature (25)..(25): n is a, c, g, or t
  misc_feature (35)..(35): n is a, c, g, or t
  misc_feature (75)..(75): n is a, c, g, or t
  misc_feature (84)..(84): n is a, c, g, or t
  misc_feature (99)..(99): n is a, c, g, or t
tttgannncccaangagnancncgntgaaaaaggncctgatgaattcaccaccaatgcctcacaatctttgtggnggactaaantgtttttgccttttnttgaaaaagcctttgctcagcg

SEQ ID NO: 465 - DNA, 175 bp, Unknown Organism
  polynucleotide sequence showing no homology to known genes
  misc_feature (1)..(1): n is a, c, g, or t
  misc_feature (6)..(6): n is a, c, g, or t
  misc_feature (15)..(15): n is a, c, g, or t
  misc_feature (19)..(19): n is a, c, g, or t
  misc_feature (22)..(22): n is a, c, g, or t
  misc_feature (87)..(87): n is a, c, g, or t
ngttgnaaacatgcngccntcngggtctatccaggaatgcgattctgccagatgcgattccacacgctagtcggaaaagtcgatagntataaaaagaagggcaactatcagggtgagctcgcggaaggacctgttccttctcgttcctggaaaatgtttgaagacgagagcgtgc

SEQ ID NO: 466 - DNA, 247 bp, Unknown Organism
  polynucleotide sequence showing no homology to known genes
  misc_feature (8)..(8): n is a, c, g, or t
ggctgccntcagtccacccggagacccaaggtagacctgcaggcgttcgcggggtctggcgtctccctctatctctattacctgtttcattttctttcgttcaaaaacagtttattgtattttcttcaggccttgtttgtagtgactcttagatagtatgtgacactatgacaccagattttgggtattgaggttttgaaagctgtaatagatatagtcttgagttataaaatttgttgatttccgc

SEQ ID NO: 467 - DNA, 237 bp, Unknown Organism
  polynucleotide sequence showing no homology to known genes
acatctaaagacggcaaagttcaagagacttcagctctggcatctgtaagtgggatatcaaagcgcatttctgaaacccctcaacgagaaaatagaaggactagaacaaagcttgaccaaccattctgtagaagcgacacagaaaagggtgaattgctatcacactcaggaaatttcgaatcaataaacgagaatggaaacagaacatgttcccgtactgtattttctcctttcagc

SEQ ID NO: 468 - DNA, 61 bp, Unknown Organism
  polynucleotide sequence showing no homology to known genes
  misc_feature (3)..(3): n is a, c, g, or t
  misc_feature (7)..(7): n is a, c, g, or t
  misc_feature (13)..(13): n is a, c, g, or t
  misc_feature (16)..(16): n is a, c, g, or t
  misc_feature (22)..(22): n is a, c, g, or t
  misc_feature (27)..(27): n is a, c, g, or t
  misc_feature (33)..(33): n is a, c, g, or t
  misc_feature (37)..(37): n is a, c, g, or t
  misc_feature (40)..(40): n is a, c, g, or t
  misc_feature (47)..(48): n is a, c, g, or t
tangcantttttnatngtcgcntgtanaagccncaantcngatcggnnccaaccttctgag

SEQ ID NO: 469 - DNA, 57 bp, Unknown Organism
  polynucleotide sequence showing no homology to known genes
  misc_feature (5)..(5): n is a, c, g, or t
  misc_feature (12)..(13): n is a, c, g, or t
  misc_feature (18)..(18): n is a, c, g, or t
  misc_feature (21)..(21): n is a, c, g, or t
  misc_feature (23)..(23): n is a, c, g, or t
  misc_feature (27)..(27): n is a, c, g, or t
  misc_feature (39)..(39): n is a, c, g, or t
  misc_feature (41)..(41): n is a, c, g, or t
  misc_feature (43)..(43): n is a, c, g, or t
  misc_feature (52)..(52): n is a, c, g, or t
tgtancttcttnngctcntcngntggntgggcagtctgnantnatcagctgncttcc

SEQ ID NO: 470 - DNA, 65 bp, Unknown Organism
  polynucleotide sequence showing no homology to known genes
  misc_feature (7)..(7): n is a, c, g, or t
  misc_feature (12)..(13): n is a, c, g, or t
  misc_feature (19)..(19): n is a, c, g, or t
  misc_feature (23)..(23): n is a, c, g, or t
  misc_feature (29)..(29): n is a, c, g, or t
  misc_feature (60)..(60): n is a, c, g, or t
  misc_feature (65)..(65): n is a, c, g, or t
gaacagnagaannggaagnatanggaagncgaaggagtgagcacaacggcaccaccatgnctcgn

SEQ ID NO: 471 - DNA, 119 bp, Unknown Organism
  polynucleotide sequence showing no homology to known genes
  misc_feature (23)..(24): n is a, c, g, or t
  misc_feature (29)..(29): n is a, c, g, or t
  misc_feature (35)..(35): n is a, c, g, or t
  misc_feature (46)..(46): n is a, c, g, or t
  misc_feature (53)..(53): n is a, c, g, or t
  misc_feature (61)..(61): n is a, c, g, or t
  misc_feature (65)..(65): n is a, c, g, or t
  misc_feature (68)..(68): n is a, c, g, or t
  misc_feature (74)..(74): n is a, c, g, or t
  misc_feature (78)..(78): n is a, c, g, or t
  misc_feature (86)..(87): n is a, c, g, or t
  misc_feature (92)..(92): n is a, c, g, or t
  misc_feature (95)..(95): n is a, c, g, or t
  misc_feature (98)..(98): n is a, c, g, or t
  misc_feature (103)..(103): n is a, c, g, or t
  misc_feature (107)..(108): n is a, c, g, or t
  misc_feature (110)..(110): n is a, c, g, or t
tttttgctagggatggttggacnngtganttttgnatgtgagtgcntctatcntttagcanttcnatnaacttncccncggaaggnnttatncgngcngagcntggnncnatattttgt

SEQ ID NO: 472 - DNA, 56 bp, Unknown Organism
  polynucleotide sequence showing no homology to known genes
  misc_feature (15)..(15): n is a, c, g, or t
  misc_feature (25)..(25): n is a, c, g, or t
  misc_feature (33)..(33): n is a, c, g, or t
  misc_feature (35)..(35): n is a, c, g, or t
  misc_feature (39)..(40): n is a, c, g, or t
  misc_feature (46)..(47): n is a, c, g, or t
  misc_feature (51)..(53): n is a, c, g, or t
  misc_feature (55)..(55): n is a, c, g, or t
tgggggcaagcaccngcggcggagnggaggagnangtgnnggcttnncagnnnanc

SEQ ID NO: 473 - DNA, 103 bp, Unknown Organism
  polynucleotide sequence showing no homology to known genes
  misc_feature (2)..(2): n is a, c, g, or t
  misc_feature (16)..(16): n is a, c, g, or t
  misc_feature (38)..(39): n is a, c, g, or t
  misc_feature (41)..(41): n is a, c, g, or t
  misc_feature (43)..(43): n is a, c, g, or t
  misc_feature (47)..(47): n is a, c, g, or t
  misc_feature (66)..(66): n is a, c, g, or t
  misc_feature (85)..(85): n is a, c, g, or t
tnctttcaagaaatcnatggtgatgaaaatctttttgnngntncganatgaggattcatttggagntagacaattaccaattttnctttgccttctgtaataa

SEQ ID NO: 474 - DNA, 135 bp, Unknown Organism
  polynucleotide sequence showing no homology to known genes
ttattactgagcttcatttctcctgctttcaatcatatgcatagcatgtaacacttagtttgtttctagaaagattctgattagtatatctatcaacgaataggatgtaactaaaatctggaatatgttagttta

SEQ ID NO: 475 - DNA, 223 bp, Unknown Organism
  polynucleotide sequence showing no homology to known genes
  misc_feature (12)..(12): n is a, c, g, or t
  misc_feature (22)..(22): n is a, c, g, or t
  misc_feature (24)..(24): n is a, c, g, or t
  misc_feature (35)..(35): n is a, c, g, or t
  misc_feature (42)..(42): n is a, c, g, or t
  misc_feature (50)..(51): n is a, c, g, or t
  misc_feature (65)..(67): n is a, c, g, or t
  misc_feature (72)..(72): n is a, c, g, or t
  misc_feature (78)..(78): n is a, c, g, or t
  misc_feature (81)..(82): n is a, c, g, or t
  misc_feature (86)..(86): n is a, c, g, or t
  misc_feature (121)..(122): n is a, c, g, or t
  misc_feature (126)..(126): n is a, c, g, or t
  misc_feature (132)..(132): n is a, c, g, or t
  misc_feature (134)..(134): n is a, c, g, or t
  misc_feature (139)..(139): n is a, c, g, or t
  misc_feature (154)..(154): n is a, c, g, or t
  misc_feature (215)..(215): n is a, c, g, or t
cattatgcgganttacaggatnantacaacgactnatctganaagcatannttgatcttgcaggnnntacangatgtnaanntggntgcagcaaaagcaggaagaaaaggtcatggtgctnntttngccaanantctcnctgcggagctctcanctttgagagtggaaagggagagggagagggaaatgctgaaaaaggagaatagaagccttanagctcaac

SEQ ID NO: 476 - DNA, 17 bp, Unknown Organism
  polynucleotide sequence showing no homology to known genes
  misc_feature (5)..(5): n is a, c, g, or t
  misc_feature (9)..(9): n is a, c, g, or t
tatcncaantactggac

SEQ ID NO: 477 - DNA, 26 bp, Unknown Organism
  polynucleotide sequence showing no homology to known genes
  misc_feature (1)..(1): n is a, c, g, or t
nttaggttaagtactttattttgaac

SEQ ID NO: 478 - DNA, 48 bp, Unknown Organism
  polynucleotide sequence showing no homology to known genes
ccaaggaaaaaggaaatcttgataaaggacttttggaatgttgtttgc

SEQ ID NO: 479 - DNA, 91 bp, Unknown Organism
  polynucleotide sequence showing no homology to known genes
  misc_feature (3)..(3): n is a, c, g, or t
  misc_feature (5)..(5): n is a, c, g, or t
agnanccctgttgtttcatcggattcggctactgcctcatcagagttgctctcagatttcgaccggagttttcgttttctgatggatttca

SEQ ID NO: 480 - DNA, 110 bp, Unknown Organism
  polynucleotide sequence showing no homology to known genes
  misc_feature (5)..(5): n is a, c, g, or t
tcggnatataatatcaccgcaaatgacctcgactctcaaatggcgaccttgaccgcgaaactacaatgattcaaactcgaaaaatgctcaatgatgttcaacctgcttta

SEQ ID NO: 481 - DNA, 283 bp, Unknown Organism
  polynucleotide sequence showing no homology to known genes
  misc_feature (8)..(8): n is a, c, g, or t
gccccttnaacagcagcaaaaaggacagcagtcaattccccttttccctaagactgccaatgcctagtcaatccatcatctatctaatcggaagcagaaaataccaaggcttccagaacaccagagcattgtcactgcaacttggtgggcattttccatttagaactgacatctgttgagtgaaaattttatagcgcactctttgcacatcttactggtccaataatgttcttccaatttgatgctgtttctatgctaatccaagacctgtttcccgtctcct

SEQ ID NO: 482 - DNA, 48 bp, Unknown Organism
  polynucleotide sequence showing no homology to known genes
  misc_feature (10)..(10): n is a, c, g, or t
agacgctgtnaagtaatgaatttcttgaggacgctcatcgaaaggacc

SEQ ID NO: 483 - DNA, 76 bp, Unknown Organism
  polynucleotide sequence showing no homology to known genes
  misc_feature (10)..(10): n is a, c, g, or t
  misc_feature (25)..(25): n is a, c, g, or t
  misc_feature (42)..(42): n is a, c, g, or t
  misc_feature (70)..(70): n is a, c, g, or t
tgcccttttnccagccgtgtgttgntattttcgtcacaaagnttatcacaggtctcaaagatcaccaatnaagagc

SEQ ID NO: 484 - DNA, 136 bp, Unknown Organism
  polynucleotide sequence showing no homology to known genes
  misc_feature (9)..(9): n is a, c, g, or t
  misc_feature (12)..(12): n is a, c, g, or t
  misc_feature (42)..(42): n is a, c, g, or t
  misc_feature (116)..(116): n is a, c, g, or t
  misc_feature (135)..(135): n is a, c, g, or t
ttcccgctntanacgcccttattcgagtttgaggatctgtcnaggtcgagtttacggcgagtcaagttgtaatcttgttgttttgacaacgagtcgatgtttttagtcaagtaacncaataccaaaggaaatggnc

SEQ ID NO: 485 - DNA, 145 bp, Unknown Organism
  polynucleotide sequence showing no homology to known genes
  misc_feature (4)..(4): n is a, c, g, or t
  misc_feature (8)..(8): n is a, c, g, or t
  misc_feature (52)..(52): n is a, c, g, or t
  misc_feature (62)..(62): n is a, c, g, or t
ctancggnaaatctccttcttcacaaacgaaaccctagcaaaactccatctncatatcaggncgtttcaacactagagaccaaaggaatgtctcttcagccaagagtcatgccctcccatccgttctgcttcttcaccatcttca

SEQ ID NO: 486 - DNA, 149 bp, Unknown Organism
  polynucleotide sequence showing no homology to known genes
  misc_feature (6)..(6): n is a, c, g, or t
  misc_feature (21)..(21): n is a, c, g, or t
ctcctncttttattttaccgntagctgatattgttgctttgattggctttctaaaaattgtaaaatgcatatttacgcttgaattttcagagatgtattttgggtgattgctttgtttattttgagaagtagagatattgaattccacc

SEQ ID NO: 487 - DNA, 170 bp, Unknown Organism
  polynucleotide sequence showing no homology to known genes
  misc_feature (9)..(9): n is a, c, g, or t
  misc_feature (69)..(69): n is a, c, g, or t
aggaaaatngtgagagcaaaataaatgagagaacgaggaagaaacagatatggatatgagaaaacgatncgcttttcttctttcccattcacctgaaaccaaaaacacctctctcattttagctactgaaacaatcaccaaatgtcacctaaacaaccagaaaacctcca

SEQ ID NO: 488 - DNA, 208 bp, Unknown Organism
  polynucleotide sequence showing no homology to known genes
  misc_feature (2)..(3): n is a, c, g, or t
  misc_feature (7)..(8): n is a, c, g, or t
  misc_feature (18)..(21): n is a, c, g, or t
  misc_feature (29)..(29): n is a, c, g, or t
  misc_feature (36)..(36): n is a, c, g, or t
  misc_feature (50)..(50): n is a, c, g, or t
  misc_feature (56)..(56): n is a, c, g, or t
  misc_feature (59)..(60): n is a, c, g, or t
  misc_feature (62)..(62): n is a, c, g, or t
  misc_feature (67)..(67): n is a, c, g, or t
  misc_feature (75)..(75): n is a, c, g, or t
  misc_feature (88)..(88): n is a, c, g, or t
  misc_feature (92)..(92): n is a, c, g, or t
  misc_feature (97)..(97): n is a, c, g, or t
  misc_feature (101)..(101): n is a, c, g, or t
  misc_feature (103)..(103): n is a, c, g, or t
  misc_feature (109)..(109): n is a, c, g, or t
  misc_feature (114)..(114): n is a, c, g, or t
  misc_feature (120)..(120): n is a, c, g, or t
  misc_feature (124)..(124): n is a, c, g, or t
  misc_feature (159)..(159): n is a, c, g, or t
  misc_feature (162)..(162): n is a, c, g, or t
  misc_feature (171)..(171): n is a, c, g, or t
  misc_feature (176)..(176): n is a, c, g, or t
  misc_feature (178)..(178): n is a, c, g, or t
  misc_feature (182)..(182): n is a, c, g, or t
  misc_feature (186)..(186): n is a, c, g, or t
  misc_feature (190)..(190): n is a, c, g, or t
  misc_feature (197)..(197): n is a, c, g, or t
  misc_feature (199)..(199): n is a, c, g, or t
  misc_feature (202)..(202): n is a, c, g, or t
anncccnntttgagggannnnggctgggnctgatgngtgtgatgctacgnacttanganncnatgcngaaaaaangtatatctacgtngganggccnttgntncctggnggcgnagatgncgcnatttgtacttagacacatttcaaagcatgttggcnaanggagattgngaaantnttgntgtnaaanttagtcntnagngttacc

SEQ ID NO: 489 - DNA, 228 bp, Unknown Organism
  polynucleotide sequence showing no homology to known genes
  misc_feature (2)..(2): n is a, c, g, or t
  misc_feature (10)..(10): n is a, c, g, or t
  misc_feature (17)..(17): n is a, c, g, or t
tncccggttngttaagngacttcagctctggcatctgtaagtgggatatcaaagcgcatttctgaaacccctcaacgagaaaatagaaggactagaacaaagcttgaccaaccattctgtagaagcgacacagaaaagggtgaattgctatcacactcaggaaatttcgaatcaataaacgagaatggaaacagaacatgttcccgtactgtattttctcctttcagc

SEQ ID NO: 490 - DNA, 201 bp, Unknown Organism
  polynucleotide sequence showing no homology to known genes
  misc_feature (5)..(5): n is a, c, g, or t
  misc_feature (9)..(9): n is a, c, g, or t
tcaantganaggtgtgggaagaaatgaagaattgttgatggcttattttgggaaaagccttacaggagtagcttccgaatggtttatggatcaagacacgtcttgtcaaacagttccaatacaacattgacattgccccagaccgcaattccctttcaaacttgaagaagaaaccaactgaaagtttcagggaatatgcca

SEQ ID NO: 491 - DNA, 49 bp, Unknown Organism
  polynucleotide sequence showing no homology to known genes
  misc_feature (5)..(5): n is a, c, g, or t
ggaancgggaattcttgataaagggacttttgggaatggttggtttggc

SEQ ID NO: 492 - DNA, 88 bp, Unknown Organism
  polynucleotide sequence showing no homology to known genes
  misc_feature (3)..(3): n is a, c, g, or t
  misc_feature (6)..(6): n is a, c, g, or t
gcnttncggaattcctctctctatatgagactgaaagactatgttcaggaacttgctaaatttgagattgatacacacaacattataa

SEQ ID NO: 493 - DNA, 101 bp, Unknown Organism
  polynucleotide sequence showing no homology to known genes
  misc_feature (1)..(2): n is a, c, g, or t
  misc_feature (31)..(32): n is a, c, g, or t
  misc_feature (36)..(37): n is a, c, g, or t
  misc_feature (40)..(40): n is a, c, g, or t
  misc_feature (47)..(47): n is a, c, g, or t
  misc_feature (49)..(49): n is a, c, g, or t
  misc_feature (52)..(52): n is a, c, g, or t
  misc_feature (62)..(62): n is a, c, g, or t
  misc_feature (66)..(66): n is a, c, g, or t
  misc_feature (69)..(69): n is a, c, g, or t
  misc_feature (73)..(73): n is a, c, g, or t
  misc_feature (89)..(89): n is a, c, g, or t
  misc_feature (98)..(98): n is a, c, g, or t
nnctggtaagaaatagatggtgacagaaaanntttnnggngttacgntngangattcattangggnganaaanaccaattttcctttgncttctgtantaa

SEQ ID NO: 494 - DNA, 41 bp, Unknown Organism
  polynucleotide sequence showing no homology to known genes
gggcctttagggaaggatgctttgttggcttatggttatga

SEQ ID NO: 495 - DNA, 79 bp, Unknown Organism
  polynucleotide sequence showing no homology to known genes
  misc_feature (3)..(4): n is a, c, g, or t
  misc_feature (10)..(10): n is a, c, g, or t
  misc_feature (43)..(43): n is a, c, g, or t
ttnnctccantacggaaacaagcaccggctaccgaggactccnatatgacacgagaacttttcaggtttggcgcccgtt

SEQ ID NO: 496 - DNA, 92 bp, Unknown Organism
  polynucleotide sequence showing no homology to known genes
  misc_feature (17)..(18): n is a, c, g, or t
  misc_feature (20)..(20): n is a, c, g, or t
  misc_feature (26)..(26): n is a, c, g, or t
  misc_feature (33)..(33): n is a, c, g, or t
  misc_feature (37)..(38): n is a, c, g, or t
  misc_feature (56)..(56): n is a, c, g, or t
  misc_feature (81)..(81): n is a, c, g, or t
ggtatggaagagctcanncnaaacgngaggaantttnnggaaaacaatatggagcntcaacatggataggaaatgtcaaangcttgggcgct

SEQ ID NO: 497 - DNA, 88 bp, Unknown Organism
  polynucleotide sequence showing no homology to known genes
gtccgaacaccaagagagaaacccagtgccaatggagttcaattttcatactgaaaagaggattcatcataatccgcaattgatctgt

SEQ ID NO: 498 - DNA, 135 bp, Unknown Organism
  polynucleotide sequence showing no homology to known genes
  misc_feature (10)..(10): n is a, c, g, or t
  misc_feature (16)..(16): n is a, c, g, or t
  misc_feature (22)..(23): n is a, c, g, or t
  misc_feature (28)..(28): n is a, c, g, or t
  misc_feature (42)..(44): n is a, c, g, or t
  misc_feature (55)..(55): n is a, c, g, or t
  misc_feature (57)..(57): n is a, c, g, or t
  misc_feature (66)..(66): n is a, c, g, or t
  misc_feature (74)..(74): n is a, c, g, or t
  misc_feature (77)..(77): n is a, c, g, or t
  misc_feature (79)..(79): n is a, c, g, or t
  misc_feature (89)..(89): n is a, c, g, or t
  misc_feature (102)..(102): n is a, c, g, or t
gaaatacacnatttcnagctgnnccctngaatggatgccaannntgctaatgctngnccaatgacngtatcganaanangtcgcacacnagaattgaggctnacagggatatgattacacctgttggagacgctt

SEQ ID NO: 499 - DNA, 130 bp, Unknown Organism
  polynucleotide sequence showing no homology to known genes
  misc_feature (6)..(6): n is a, c, g, or t
  misc_feature (12)..(12): n is a, c, g, or t
  misc_feature (20)..(21): n is a, c, g, or t
  misc_feature (24)..(25): n is a, c, g, or t
  misc_feature (34)..(35): n is a, c, g, or t
  misc_feature (37)..(37): n is a, c, g, or t
  misc_feature (39)..(39): n is a, c, g, or t
  misc_feature (42)..(42): n is a, c, g, or t
  misc_feature (47)..(47): n is a, c, g, or t
  misc_feature (56)..(56): n is a, c, g, or t
  misc_feature (63)..(64): n is a, c, g, or t
  misc_feature (72)..(72): n is a, c, g, or t
  misc_feature (77)..(78): n is a, c, g, or t
  misc_feature (81)..(81): n is a, c, g, or t
  misc_feature (87)..(90): n is a, c, g, or t
  misc_feature (116)..(116): n is a, c, g, or t
  misc_feature (123)..(123): n is a, c, g, or t
gaacantgatgntttcctcnnggnnggctaaggnntncnccnacccngacagggcntggattnnggttcttntttcnncgngtcccnnnnaatctgactttgactactaagaattncatacgngtggggt

SEQ ID NO: 500 - DNA, 126 bp, Unknown Organism
  polynucleotide sequence showing no homology to known genes
ttatgtttcttgagtgttttctgtctgtgaaggtttagctcacaccaagttttcttttcatttgctaacaccaatgttcccactgaaatgtgggacaaaagtaggaagcaaagggtgagagctgct

SEQ ID NO: 501 - DNA, 158 bp, Unknown Organism
  polynucleotide sequence showing no homology to known genes
  misc_feature (11)..(11): n is a, c, g, or t
  misc_feature (42)..(42): n is a, c, g, or t
  misc_feature (65)..(65): n is a, c, g, or t
  misc_feature (89)..(89): n is a, c, g, or t
gcgcctttgtntataatgcaccttttttcttctgaaaatatnctcctgatgatcttgctttggcnctatgaattcattattgtttgtgntgaattggctaaacctaggggtaccaactttttattcctgaagtggtggaacatttacctatcttgttt

SEQ ID NO: 502 - DNA, 139 bp, Unknown Organism
  polynucleotide sequence showing no homology to known genes
  misc_feature (6)..(6): n is a, c, g, or t
  misc_feature (8)..(10): n is a, c, g, or t
  misc_feature (21)..(21): n is a, c, g, or t
  misc_feature (24)..(24): n is a, c, g, or t
  misc_feature (30)..(30): n is a, c, g, or t
  misc_feature (62)..(62): n is a, c, g, or t
  misc_feature (69)..(69): n is a, c, g, or t
  misc_feature (124)..(124): n is a, c, g, or t
actaancnnnccccataactncgnttaatntacatcaaacctgtactctctccatgtaatgnggttgtnagatcactgttctctatacgaggctcattacataccgaatatacgaccctcttgnttctcttttggctgt

SEQ ID NO: 503 - DNA, 206 bp, Unknown Organism
  polynucleotide sequence showing no homology to known genes
  misc_feature (1)..(1): n is a, c, g, or t
  misc_feature (4)..(4): n is a, c, g, or t
  misc_feature (10)..(10): n is a, c, g, or t
  misc_feature (19)..(19): n is a, c, g, or t
  misc_feature (24)..(24): n is a, c, g, or t
  misc_feature (26)..(26): n is a, c, g, or t
  misc_feature (47)..(47): n is a, c, g, or t
  misc_feature (55)..(55): n is a, c, g, or t
  misc_feature (98)..(98): n is a, c, g, or t
  misc_feature (100)..(100): n is a, c, g, or t
  misc_feature (104)..(104): n is a, c, g, or t
  misc_feature (113)..(113): n is a, c, g, or t
  misc_feature (153)..(153): n is a, c, g, or t
  misc_feature (172)..(172): n is a, c, g, or t
  misc_feature (175)..(175): n is a, c, g, or t
  misc_feature (189)..(191): n is a, c, g, or t
  misc_feature (200)..(200): n is a, c, g, or t
nacngcgagngatactccnaaacngnaaaagaactccggaacacgcntggagcangagatttttttgagcacacaaggcggagccaagctctaacagncngcangaaggaagngatgcatggtgagagtacaggcgagaacacatgacatctntaacatactctcacataanctngaaactgacgtgtnnnacagaactnaatgct

SEQ ID NO: 504 - DNA, 284 bp, Unknown Organism
  polynucleotide sequence showing no homology to known genes
  misc_feature (1)..(1): n is a, c, g, or t
  misc_feature (10)..(10): n is a, c, g, or t
  misc_feature (13)..(13): n is a, c, g, or t
  misc_feature (34)..(34): n is a, c, g, or t
  misc_feature (104)..(104): n is a, c, g, or t
  misc_feature (249)..(249): n is a, c, g, or t
  misc_feature (253)..(253): n is a, c, g, or t
  misc_feature (267)..(267): n is a, c, g, or t
natcctcccntcnaaaagcccgggttgccagggnttgacgtctgaccgatttgcagaagtatcattgaatgttgctcgtcatatatctgcagacttggagaggntttaccgcaatgtggggggtcagccgcaggaacaagcgccttgattacagtgatgctggtggattctactgcagagatcaaagtcttctttagctagcagtccttttgattattcttttgttatctttgagtttgtaagagtctnctgntgttttgatcatgntattttgccttttattt

SEQ ID NO: 505 - DNA, 54 bp, Unknown Organism
  polynucleotide sequence showing no homology to known genes
  misc_feature (3)..(3): n is a, c, g, or t
  misc_feature (14)..(14): n is a, c, g, or t
  misc_feature (23)..(23): n is a, c, g, or t
  misc_feature (36)..(36): n is a, c, g, or t
ttntggagaaaggngtgtaatgnacattgtgtgtangcacaacatggattttgt

SEQ ID NO: 506 - DNA, 100 bp, Unknown Organism
  polynucleotide sequence showing no homology to known genes
  misc_feature (16)..(16): n is a, c, g, or t
  misc_feature (30)..(31): n is a, c, g, or t
  misc_feature (42)..(44): n is a, c, g, or t
  misc_feature (53)..(53): n is a, c, g, or t
  misc_feature (58)..(58): n is a, c, g, or t
  misc_feature (75)..(75): n is a, c, g, or t
acctggttgttccganccaccaagagagannccacagtgccnnnggagtccanttttnatactgaaaagaggatncatcataatccgccaattgatctgt

SEQ ID NO: 507 - DNA, 211 bp, Unknown Organism
  polynucleotide sequence showing no homology to known genes
tgtggcaaaacatgtaagcgagcagctaatcaacaagcttgattcggagatagaagccgctgaaaaagctcatgaagatgaaccatgacatagctcaaagattacttagatatagtagttcaaccttactaatttttgttgcatagtgcaaatagacttcttgaatgctttgtagaggtgaacccaaacttgtcatatcaattctatagtg

SEQ ID NO: 508 - DNA, 68 bp, Unknown Organism
  polynucleotide sequence showing no homology to known genes
  misc_feature (5)..(5): n is a, c, g, or t
  misc_feature (11)..(11): n is a, c, g, or t
  misc_feature (20)..(20): n is a, c, g, or t
  misc_feature (24)..(24): n is a, c, g, or t
  misc_feature (36)..(36): n is a, c, g, or t
  misc_feature (39)..(39): n is a, c, g, or t
  misc_feature (44)..(44): n is a, c, g, or t
  misc_feature (64)..(64): n is a, c, g, or t
aggcnctgctnctgggtccnactntgctacacaagnaanaaaanagcaagctctcgttggtttnctct

SEQ ID NO: 509 - DNA, 120 bp, Unknown Organism
  polynucleotide sequence showing no homology to known genes
  misc_feature (3)..(3): n is a, c, g, or t
  misc_feature (13)..(13): n is a, c, g, or t
  misc_feature (20)..(20): n is a, c, g, or t
  misc_feature (24)..(24): n is a, c, g, or t
  misc_feature (32)..(32): n is a, c, g, or t
  misc_feature (35)..(35): n is a, c, g, or t
  misc_feature (37)..(37): n is a, c, g, or t
  misc_feature (41)..(43): n is a, c, g, or t
  misc_feature (45)..(45): n is a, c, g, or t
  misc_feature (60)..(60): n is a, c, g, or t
  misc_feature (65)..(65): n is a, c, g, or t
  misc_feature (67)..(68): n is a, c, g, or t
  misc_feature (80)..(80): n is a, c, g, or t
  misc_feature (96)..(96): n is a, c, g, or t
  misc_feature (99)..(99): n is a, c, g, or t
  misc_feature (118)..(118): n is a, c, g, or t
ggntcggaaatcncggatgnaagnccccaagncgnangatnnnangcgcaggggtatagnatgananncctatgctatanggagctacagtaggcnagnttattgaggcctgacattncc

SEQ ID NO: 510 - DNA, 162 bp, Unknown Organism
  polynucleotide sequence showing no homology to known genes
  misc_feature (2)..(2): n is a, c, g, or t
  misc_feature (4)..(4): n is a, c, g, or t
  misc_feature (11)..(12): n is a, c, g, or t
  misc_feature (20)..(20): n is a, c, g, or t
  misc_feature (53)..(53): n is a, c, g, or t
  misc_feature (55)..(55): n is a, c, g, or t
  misc_feature (63)..(63): n is a, c, g, or t
  misc_feature (69)..(69): n is a, c, g, or t
  misc_feature (80)..(80): n is a, c, g, or t
  misc_feature (82)..(82): n is a, c, g, or t
  misc_feature (120)..(120): n is a, c, g, or t
  misc_feature (131)..(131): n is a, c, g, or t
gncncggtttnngctccgcnattgatcgttactgtgactagacagaaacctgnangtcttcanactttnacaaaaggaangngctgacaaggcaacaggccttccatcctatgatcacgnagaatcaactnttggagcatttgacaacattgcgctatagcc

SEQ ID NO: 511 - DNA, 230 bp, Unknown Organism
  polynucleotide sequence showing no homology to known genes
  misc_feature (3)..(3): n is a, c, g, or t
  misc_feature (21)..(21): n is a, c, g, or t
  misc_feature (24)..(24): n is a, c, g, or t
  misc_feature (40)..(40): n is a, c, g, or t
  misc_feature (46)..(46): n is a, c, g, or t
  misc_feature (49)..(51): n is a, c, g, or t
  misc_feature (54)..(55): n is a, c, g, or t
  misc_feature (58)..(58): n is a, c, g, or t
  misc_feature (68)..(68): n is a, c, g, or t
  misc_feature (71)..(71): n is a, c, g, or t
  misc_feature (93)..(93): n is a, c, g, or t
  misc_feature (96)..(96): n is a, c, g, or t
  misc_feature (98)..(98): n is a, c, g, or t
  misc_feature (100)..(100): n is a, c, g, or t
  misc_feature (125)..(125): n is a, c, g, or t
  misc_feature (130)..(130): n is a, c, g, or t
  misc_feature (147)..(147): n is a, c, g, or t
  misc_feature (154)..(155): n is a, c, g, or t
  misc_feature (159)..(160): n is a, c, g, or t
  misc_feature (165)..(165): n is a, c, g, or t
  misc_feature (167)..(167): n is a, c, g, or t
  misc_feature (188)..(188): n is a, c, g, or t
  misc_feature (199)..(199): n is a, c, g, or t
  misc_feature (206)..(206): n is a, c, g, or t
  misc_feature (210)..(210): n is a, c, g, or t
  misc_feature (213)..(213): n is a, c, g, or t
  misc_feature (221)..(221): n is a, c, g, or t
  misc_feature (223)..(224): n is a, c, g, or t
aanccctactttatacatgangtntgtgaatacttgtaanggaagnatnnngannagnttgggatgcnaangtatgttctggtgttatgcatnctncnantgctcttgctgaaatccacaactanaatantacttgcactacattanggctgtnnttanncaatnantagttttttgctgatttgcanctccatgtatngatagcngagngtngacaatcnannattcct

SEQ ID NO: 512 - DNA, 69 bp, Unknown Organism
  polynucleotide sequence showing no homology to known genes
  misc_feature (1)..(1): n is a, c, g, or t
  misc_feature (3)..(3): n is a, c, g, or t
  misc_feature (7)..(7): n is a, c, g, or t
  misc_feature (18)..(18): n is a, c, g, or t
  misc_feature (21)..(21): n is a, c, g, or t
  misc_feature (31)..(31): n is a, c, g, or t
  misc_feature (48)..(48): n is a, c, g, or t
nancccnctgtaagctcnctnaggactagtntaaaggggggcaaacanctgatgaatgccaactgagat

SEQ ID NO: 513 - DNA, 51 bp, Unknown Organism
  polynucleotide sequence showing no homology to known genes
  misc_feature (1)..(2): n is a, c, g, or t
  misc_feature (10)..(10): n is a, c, g, or t
  misc_feature (14)..(16): n is a, c, g, or t
  misc_feature (23)..(23): n is a, c, g, or t
  misc_feature (30)..(30): n is a, c, g, or t
  misc_feature (34)..(34): n is a, c, g, or t
  misc_feature (43)..(44): n is a, c, g, or t
  misc_feature (48)..(48): n is a, c, g, or t
nncttttttngtgnnncatattnatgtttntatnacaaaaganntgtntaa

SEQ ID NO: 514 - DNA, 61 bp, Unknown Organism
  polynucleotide sequence showing no homology to known genes
  misc_feature (9)..(9): n is a, c, g, or t
  misc_feature (18)..(19): n is a, c, g, or t
  misc_feature (33)..(33): n is a, c, g, or t
  misc_feature (38)..(38): n is a, c, g, or t
  misc_feature (46)..(46): n is a, c, g, or t
gccccgatnttttagggnnaaactctgcatttntgaanggaatgangtctatacgcattga

SEQ ID NO: 515 - DNA, 70 bp, Unknown Organism
  polynucleotide sequence showing no homology to known genes
  misc_feature (3)..(3): n is a, c, g, or t
  misc_feature (5)..(5): n is a, c, g, or t
  misc_feature (8)..(9): n is a, c, g, or t
  misc_feature (14)..(14): n is a, c, g, or t
  misc_feature (19)..(19): n is a, c, g, or t
  misc_feature (21)..(21): n is a, c, g, or t
  misc_feature (24)..(24): n is a, c, g, or t
  misc_feature (26)..(26): n is a, c, g, or t
  misc_feature (40)..(41): n is a, c, g, or t
  misc_feature (48)..(49): n is a, c, g, or t
  misc_feature (53)..(53): n is a, c, g, or t
  misc_feature (66)..(67): n is a, c, g, or t
atncnacnnttgcnatgcntngtncngggacttgaagccnngcaatcnnctgnggaatgccagctnngat

SEQ ID NO: 516 - DNA, 72 bp, Unknown Organism; identical to SEQ ID NO: 315
  polynucleotide sequence showing no homology to known genes
  misc_feature (3)..(3): n is a, c, g, or t
  misc_feature (7)..(7): n is a, c, g, or t
  misc_feature (9)..(9): n is a, c, g, or t
  misc_feature (16)..(16): n is a, c, g, or t
  misc_feature (20)..(20): n is a, c, g, or t
  misc_feature (31)..(31): n is a, c, g, or t
  misc_feature (41)..(41): n is a, c, g, or t
  misc_feature (66)..(66): n is a, c, g, or t

SEQ ID NO: 517 - DNA, 81 bp, Unknown Organism
  polynucleotide sequence showing no homology to known genes
  misc_feature (5)..(5): n is a, c, g, or t
  misc_feature (8)..(8): n is a, c, g, or t
  misc_feature (18)..(18): n is a, c, g, or t
  misc_feature (20)..(21): n is a, c, g, or t
  misc_feature (25)..(25): n is a, c, g, or t
  misc_feature (36)..(36): n is a, c, g, or t
  misc_feature (43)..(43): n is a, c, g, or t
  misc_feature (47)..(47): n is a, c, g, or t
  misc_feature (52)..(52): n is a, c, g, or t
  misc_feature (54)..(54): n is a, c, g, or t
  misc_feature (60)..(61): n is a, c, g, or t
  misc_feature (67)..(67): n is a, c, g, or t
  misc_feature (76)..(77): n is a, c, g, or t
tcctnatnttagcggccngnntgcngttctggtcantgatgcnactntcggncnaatatnntgatgngtgcgacannggga

SEQ ID NO: 518 - DNA, 113 bp, Unknown Organism
  polynucleotide sequence showing no homology to known genes
  misc_feature (5)..(5): n is a, c, g, or t
  misc_feature (10)..(11): n is a, c, g, or t
  misc_feature (22)..(22): n is a, c, g, or t
  misc_feature (30)..(30): n is a, c, g, or t
  misc_feature (33)..(33): n is a, c, g, or t
  misc_feature (43)..(43): n is a, c, g, or t
  misc_feature (48)..(49): n is a, c, g, or t
  misc_feature (76)..(76): n is a, c, g, or t
  misc_feature (84)..(84): n is a, c, g, or t
  misc_feature (86)..(86): n is a, c, g, or t
  misc_feature (99)..(99): n is a, c, g, or t
  misc_feature (106)..(106): n is a, c, g, or t
atgtnccgannttgttatcctngcatgatntangggaatgatnctctnntgtaaatcaaggtgccgtaggtagttnagggacantntatataacatgcngatatgngtgtgat

SEQ ID NO: 519 - DNA, 90 bp, Unknown Organism
  polynucleotide sequence showing no homology to known genes
  misc_feature (7)..(7): n is a, c, g, or t
  misc_feature (13)..(13): n is a, c, g, or t
  misc_feature (34)..(34): n is a, c, g, or t
gccgctngtattnatctgttgaagaaattgctgntcagtttgttctgcagcagtatgacaatccactttctaagaagctcaacgatatca

SEQ ID NO: 520 - DNA, 112 bp, Unknown Organism
  polynucleotide sequence showing no homology to known genes
  misc_feature (8)..(8): n is a, c, g, or t
cctaactntaaggccggcaagttcaagaccagtttagcagacacttccagaaaatcgcttgatgggtgaaactgagaagtgaggcttacaaggcaaaccattttgccataca

SEQ ID NO: 521 - DNA, 173 bp, Unknown Organism
  polynucleotide sequence showing no homology to known genes
  misc_feature (7)..(7): n is a, c, g, or t
  misc_feature (9)..(9): n is a, c, g, or t
  misc_feature (13)..(13): n is a, c, g, or t
  misc_feature (17)..(18): n is a, c, g, or t
  misc_feature (41)..(41): n is a, c, g, or t
  misc_feature (60)..(60): n is a, c, g, or t
  misc_feature (86)..(86): n is a, c, g, or t
  misc_feature (97)..(97): n is a, c, g, or t
  misc_feature (101)..(102): n is a, c, g, or t
  misc_feature (108)..(108): n is a, c, g, or t
  misc_feature (115)..(115): n is a, c, g, or t
  misc_feature (117)..(117): n is a, c, g, or t
  misc_feature (119)..(119): n is a, c, g, or t
  misc_feature (124)..(124): n is a, c, g, or t
  misc_feature (126)..(126): n is a, c, g, or t
  misc_feature (134)..(134): n is a, c, g, or t
  misc_feature (147)..(147): n is a, c, g, or t
ccctctntnatgncccnnagctgctgtgttaaaaatagagnccaagagctcataagaatnatgtccgaggaaggattatactgtgncaaacaaatcnatannttcatngtatatngngnggggnancagtgcancaagtgtggggantggttgctggaaaatataggatcaga

SEQ ID NO: 522 - DNA, 112 bp, Unknown Organism
  polynucleotide sequence showing no homology to known genes
  misc_feature (1)..(2): n is a, c, g, or t
  misc_feature (15)..(15): n is a, c, g, or t
  misc_feature (17)..(17): n is a, c, g, or t
  misc_feature (20)..(20): n is a, c, g, or t
  misc_feature (41)..(41): n is a, c, g, or t
  misc_feature (55)..(55): n is a, c, g, or t
  misc_feature (106)..(106): n is a, c, g, or t
nntaacaacccatgntntangcacaacaagtggagcatatnctaaaagttccggngaagaacttgagaaggaaagagaaagaatggtaccgaaatggagagcgagnggattt

SEQ ID NO: 523 - DNA, 121 bp, Unknown Organism
  polynucleotide sequence showing no homology to known genes
  misc_feature (5)..(6): n is a, c, g, or t
  misc_feature (11)..(12): n is a, c, g, or t
  misc_feature (36)..(36): n is a, c, g, or t
  misc_feature (40)..(40): n is a, c, g, or t
  misc_feature (42)..(42): n is a, c, g, or t
  misc_feature (48)..(48): n is a, c, g, or t
atgcnncttgnngtaacctgcccgacatttatgccntctngnttatgnttgatgttgcgtattcaagttattgacatttggctgaacaattagttcaagttattagttagtatctagtatg

SEQ ID NO: 524 - DNA, 157 bp, Unknown Organism
  polynucleotide sequence showing no homology to known genes
  misc_feature (11)..(11): n is a, c, g, or t
  misc_feature (17)..(17): n is a, c, g, or t
  misc_feature (25)..(25): n is a, c, g, or t
  misc_feature (29)..(29): n is a, c, g, or t
  misc_feature (35)..(35): n is a, c, g, or t
  misc_feature (47)..(48): n is a, c, g, or t
  misc_feature (56)..(56): n is a, c, g, or t
  misc_feature (59)..(59): n is a, c, g, or t
  misc_feature (63)..(63): n is a, c, g, or t
  misc_feature (69)..(69): n is a, c, g, or t
  misc_feature (72)..(72): n is a, c, g, or t
  misc_feature (79)..(79): n is a, c, g, or t
  misc_feature (92)..(92): n is a, c, g, or t
  misc_feature (94)..(94): n is a, c, g, or t
  misc_feature (97)..(97): n is a, c, g, or t
  misc_feature (99)..(100): n is a, c, g, or t
  misc_feature (111)..(111): n is a, c, g, or t
  misc_feature (125)..(125): n is a, c, g, or t
  misc_feature (133)..(133): n is a, c, g, or t
  misc_feature (153)..(153): n is a, c, g, or t
tgtgcacatgnctgatngtgcttgntggntgtggntaaggatatcgnngagctagnagnaccntacttnganccgctgncatgatggttcgntngtncnngctgctgaggnaagacactgtgtcngcgggacncaactctccagcgctttatnaatg

SEQ ID NO: 525 - DNA, 91 bp, Unknown Organism
  polynucleotide sequence showing no homology to known genes
taagggctgctgaacacatcaccaatgactcacaatctttgtggcggactaaattgtttttgtttttcactgaaaaagcctttgctcaccg

SEQ ID NO: 526 - DNA, 111 bp, Unknown Organism
  polynucleotide sequence showing no homology to known genes
  misc_feature (3)..(3): n is a, c, g, or t
  misc_feature (37)..(37): n is a, c, g, or t
  misc_feature (47)..(47): n is a, c, g, or t
  misc_feature (53)..(54): n is a, c, g, or t
  misc_feature (63)..(63): n is a, c, g, or t
  misc_feature (66)..(66): n is a, c, g, or t
  misc_feature (71)..(73): n is a, c, g, or t
  misc_feature (76)..(76): n is a, c, g, or t
  misc_feature (79)..(80): n is a, c, g, or t
  misc_feature (82)..(82): n is a, c, g, or t
  misc_feature (84)..(84): n is a, c, g, or t
  misc_feature (87)..(88): n is a, c, g, or t
  misc_feature (90)..(91): n is a, c, g, or t
  misc_feature (94)..(95): n is a, c, g, or t
  misc_feature (101)..(101): n is a, c, g, or t
  misc_feature (103)..(103): n is a, c, g, or t
  misc_feature (107)..(108): n is a, c, g, or t
aantccccctgtaaaacgccgcgccaaaactgggganaaagagcggnccagcnnccgatccancgntgaannnacnggnngngncannannacnngagggnantttnnagg

SEQ ID NO: 527 - DNA, 115 bp, Unknown Organism
  polynucleotide sequence showing no homology to known genes
  misc_feature (67)..(67): n is a, c, g, or t
tctccagaatcctcatcaatgctcagtatgtattagttcttagtgccattttttgagaatggccagnttcaatgtagggtataatttattggctcttttggtttggcatttgtgg

SEQ ID NO: 528 - DNA, 134 bp, Unknown Organism
  polynucleotide sequence showing no homology to known genes
  misc_feature (63)..(63): n is a, c, g, or t
aacgggaccttcgatccagacctcagaaactcgccggaaccgtgacaaaatccaacaacaacnaacggctgaagctctcctttcagaagtgtcgctgctggttgttttcagtgaagcaggggtcattggtttgg

SEQ ID NO: 529 - DNA, 160 bp, Unknown Organism
  polynucleotide sequence showing no homology to known genes
  misc_feature (1)..(1): n is a, c, g, or t
  misc_feature (7)..(7): n is a, c, g, or t
  misc_feature (13)..(13): n is a, c, g, or t
  misc_feature (23)..(23): n is a, c, g, or t
  misc_feature (25)..(25): n is a, c, g, or t
  misc_feature (27)..(27): n is a, c, g, or t
  misc_feature (32)..(32): n is a, c, g, or t
  misc_feature (38)..(38): n is a, c, g, or t
  misc_feature (48)..(48): n is a, c, g, or t
  misc_feature (51)..(51): n is a, c, g, or t
  misc_feature (57)..(57): n is a, c, g, or t
  misc_feature (61)..(62): n is a, c, g, or t
  misc_feature (77)..(77): n is a, c, g, or t
  misc_feature (79)..(79): n is a, c, g, or t
  misc_feature (85)..(85): n is a, c, g, or t
  misc_feature (87)..(88): n is a, c, g, or t
  misc_feature (139)..(139): n is a, c, g, or t
  misc_feature (141)..(141): n is a, c, g, or t
  misc_feature (154)..(154): n is a, c, g, or t
ntgagcncaattnctgccaaggncngnacggncgatgntgaactgagnccnagaggnagcnngcacttacccttatntnggggangnngaggtatacaaggtattttagtatggtattctttggaatcatttccgctcngncctagtttgttgnttcctg

SEQ ID NO: 530 - DNA, 79 bp, Unknown Organism
  polynucleotide sequence showing no homology to known genes
  misc_feature (10)..(10): n is a, c, g, or t
  misc_feature (17)..(17): n is a, c, g, or t
  misc_feature (19)..(20): n is a, c, g, or t
  misc_feature (22)..(22): n is a, c, g, or t
  misc_feature (27)..(27): n is a, c, g, or t
  misc_feature (29)..(34): n is a, c, g, or t
  misc_feature (38)..(38): n is a, c, g, or t
  misc_feature (41)..(41): n is a, c, g, or t
  misc_feature (56)..(56): n is a, c, g, or t
  misc_feature (63)..(63): n is a, c, g, or t
  misc_feature (66)..(66): n is a, c, g, or t
  misc_feature (71)..(71): n is a, c, g, or t
cgttggaaanccgtgangnntnggganannnnnnccanaanaagtcgcctagaggngaccgancgngtaancaaccttt

SEQ ID NO: 531 - DNA, 69 bp, Unknown Organism
  polynucleotide sequence showing no homology to known genes
  misc_feature (5)..(6): n is a, c, g, or t
  misc_feature (9)..(9): n is a, c, g, or t
  misc_feature (12)..(13): n is a, c, g, or t
  misc_feature (16)..(16): n is a, c, g, or t
  misc_feature (29)..(29): n is a, c, g, or t
  misc_feature (33)..(35): n is a, c, g, or t
  misc_feature (37)..(37): n is a, c, g, or t
  misc_feature (39)..(39): n is a, c, g, or t
  misc_feature (65)..(65): n is a, c, g, or t
acgcnnctngtnnatnagccactgaaccnaaannntnanctccgcacgatgctgacggcgacggntacg

SEQ ID NO: 532 - DNA, 107 bp, Unknown Organism
  polynucleotide sequence showing no homology to known genes
  misc_feature (6)..(6): n is a, c, g, or t
  misc_feature (12)..(12): n is a, c, g, or t
  misc_feature (25)..(25): n is a, c, g, or t
  misc_feature (27)..(27): n is a, c, g, or t
  misc_feature (29)..(29): n is a, c, g, or t
  misc_feature (33)..(35): n is a, c, g, or t
  misc_feature (40)..(40): n is a, c, g, or t
  misc_feature (47)..(47): n is a, c, g, or t
  misc_feature (60)..(60): n is a, c, g, or t
  misc_feature (77)..(77): n is a, c, g, or t
  misc_feature (79)..(79): n is a, c, g, or t
  misc_feature (83)..(83): n is a, c, g, or t
  misc_feature (85)..(85): n is a, c, g, or t
  misc_feature (91)..(91): n is a, c, g, or t
  misc_feature (94)..(94): n is a, c, g, or t
  misc_feature (100)..(100): n is a, c, g, or t
tctttngaaagncccttgcattttngnanaggnnnctttngcttagncttagcaagctgntggggagagtggtcaantntttngncaacanctnagcatncacatgc

SEQ ID NO: 533 - DNA, 97 bp, Unknown Organism
  polynucleotide sequence showing no homology to known genes
  misc_feature (2)..(2): n is a, c, g, or t
  misc_feature (11)..(11): n is a, c, g, or t
  misc_feature (18)..(18): n is a, c, g, or t
  misc_feature (24)..(24): n is a, c, g, or t
  misc_feature (34)..(34): n is a, c, g, or t
  misc_feature (37)..(37): n is a, c, g, or t
  misc_feature (44)..(44): n is a, c, g, or t
  misc_feature (46)..(46): n is a, c, g, or t
  misc_feature (55)..(55): n is a, c, g, or t
  misc_feature (64)..(64): n is a, c, g, or t
  misc_feature (73)..(73): n is a, c, g, or t
  misc_feature (78)..(79): n is a, c, g, or t
  misc_feature (86)..(86): n is a, c, g, or t
  misc_feature (92)..(92): n is a, c, g, or t
antcccctgtnttcttgntcaccngtgtggaggntgnactgctncntggacaggncacagtggnggactgacngttgnnacagccntattgngagcg

SEQ ID NO: 534 - DNA, 47 bp, Unknown Organism
  polynucleotide sequence showing no homology to known genes
  misc_feature (45)..(45): n is a, c, g, or t
tagcaaggaaagggctctaattcttgctcgactccttgggcggcnta

SEQ ID NO: 535 - DNA, 195 bp, Unknown Organism
  polynucleotide sequence showing no homology to known genes
  misc_feature (6)..(6): n is a, c, g, or t
  misc_feature (12)..(13): n is a, c, g, or t
  misc_feature (15)..(15): n is a, c, g, or t
  misc_feature (22)..(22): n is a, c, g, or t
  misc_feature (39)..(39): n is a, c, g, or t
  misc_feature (43)..(43): n is a, c, g, or t
  misc_feature (107)..(107): n is a, c, g, or t
aaatcnccgatnncnaataccnaaggaacatcaacaaangacntcttactatgaatcttttgtttgatgtttagagcttatttattcttatgatgttgatgatgatnctttaggcatcaaacttcatacttatatctttgttattgtatctggatgttcaacttctaagtgttatgttgttttttagtctttgag

SEQ ID NO: 536 - DNA, 212 bp, Unknown Organism
  polynucleotide sequence showing no homology to known genes
  misc_feature (1)..(1): n is a, c, g, or t
  misc_feature (3)..(3): n is a, c, g, or t
  misc_feature (9)..(9): n is a, c, g, or t
  misc_feature (12)..(12): n is a, c, g, or t
  misc_feature (22)..(22): n is a, c, g, or t
  misc_feature (37)..(37): n is a, c, g, or t
  misc_feature (42)..(42): n is a, c, g, or t
  misc_feature (63)..(64): n is a, c, g, or t
  misc_feature (104)..(104): n is a, c, g, or t
  misc_feature (107)..(107): n is a, c, g, or t
nancccccntcnaacaaacccntgctgtacccatttnaccgnttgcaaaagacatgagcctgnnggaaaaaatttacgattctatccttgtgatggtgaaagtnttnatttatgataaatctaccacttttgattggatttcacgatccaaaataaaggatggtgttgcatactataagattttagtttggagatcggtttccctcttgatc

SEQ ID NO: 537 - DNA, 261 bp, Unknown Organism
  polynucleotide sequence showing no homology to known genes
  misc_feature (1)..(1): n is a, c, g, or t
  misc_feature (10)..(11): n is a, c, g, or t
  misc_feature (31)..(32): n is a, c, g, or t
  misc_feature (36)..(36): n is a, c, g, or t
  misc_feature (71)..(72): n is a, c, g, or t
  misc_feature (80)..(80): n is a, c, g, or t
  misc_feature (202)..(202): n is a, c, g, or t
naccccaatnnaacaagcccgggtaccgagnntccnatatgatcgagaacttttcaggtttggtgcccgannttaggttnctcttctgtctcggcaatggctttaatggccttcagtgccagatcaaattcctcatcttcacatatcattccgattactggcccattgatgtgagtaggcagagaattgttcatcatattangggcctcttcatccctaaacattatttccttgacattgataaggtcttccactgctctc

SEQ ID NO: 538 - DNA, 55 bp, Unknown Organism
  polynucleotide sequence showing no homology to known genes
  misc_feature (5)..(5): n is a, c, g, or t
  misc_feature (19)..(19): n is a, c, g, or t
  misc_feature (37)..(37): n is a, c, g, or t
  misc_feature (39)..(39): n is a, c, g, or t
  misc_feature (48)..(48): n is a, c, g, or t
ttatntatattgttagacnttggagtctgaaattagngntgtttgggntgtacgc

SEQ ID NO: 539 - DNA, 55 bp, Unknown Organism
  polynucleotide sequence showing no homology to known genes
  misc_feature (2)..(2): n is a, c, g, or t
  misc_feature (10)..(10): n is a, c, g, or t
  misc_feature (15)..(15): n is a, c, g, or t
  misc_feature (55)..(55): n is a, c, g, or t
gnagaaatcnaatcnaagtagaggaagggcgatactgggaaggggggccttagcn

SEQ ID NO: 540 - DNA, 92 bp, Unknown Organism
  polynucleotide sequence showing no homology to known genes
  misc_feature (4)..(4): n is a, c, g, or t
  misc_feature (15)..(15): n is a, c, g, or t
  misc_feature (20)..(20): n is a, c, g, or t
  misc_feature (26)..(26): n is a, c, g, or t
  misc_feature (30)..(31): n is a, c, g, or t
  misc_feature (34)..(34): n is a, c, g, or t
  misc_feature (45)..(45): n is a, c, g, or t
  misc_feature (55)..(55): n is a, c, g, or t
  misc_feature (61)..(61): n is a, c, g, or t
  misc_feature (70)..(70): n is a, c, g, or t
  misc_feature (75)..(75): n is a, c, g, or t
  misc_feature (83)..(83): n is a, c, g, or t
gggnatgtcaagtangacantatggncgannctngagcgtgcacnatgtctattncagcancacattgangatanctgaggantgtcgccac

SEQ ID NO: 541 - DNA, 126 bp, Unknown Organism
  polynucleotide sequence showing no homology to known genes
  misc_feature (6)..(7): n is a, c, g, or t
  misc_feature (12)..(12): n is a, c, g, or t
  misc_feature (28)..(28): n is a, c, g, or t
  misc_feature (41)..(41): n is a, c, g, or t
  misc_feature (53)..(53): n is a, c, g, or t
  misc_feature (73)..(73): n is a, c, g, or t
  misc_feature (89)..(89): n is a, c, g, or t
  misc_feature (96)..(96): n is a, c, g, or t
  misc_feature (99)..(101): n is a, c, g, or t
aagttnngcgantatccttcgctgagtntaaatctatacantcttgaatcctnattacactgttagagagatnatgaaaaaaggacctntgaatcnaannncctactattttgcttcgcctttacc

SEQ ID NO: 542 - DNA, 193 bp, Unknown Organism
  polynucleotide sequence showing no homology to known genes
  misc_feature (2)..(3): n is a, c, g, or t
  misc_feature (5)..(6): n is a, c, g, or t
  misc_feature (103)..(103): n is a, c, g, or t
  misc_feature (155)..(155): n is a, c, g, or t
cnntnnacatttaacaagtgagagtttgaagccctttcaacttgcgcatgtgaaagcattgaatcttgcaaaaggggaatgcaggatgataaagaaactctgncatctgtatggaataaagctattgaaatgtgcgaatccaattcacttgcaanctttttgagaagacaagggaagttgtcatcaattcgtc

SEQ ID NO: 543 - DNA, 115 bp, Unknown Organism
  polynucleotide sequence showing no homology to known genes
  misc_feature (2)..(2): n is a, c, g, or t
  misc_feature (11)..(12): n is a, c, g, or t
  misc_feature (26)..(26): n is a, c, g, or t
  misc_feature (31)..(31): n is a, c, g, or t
  misc_feature (34)..(34): n is a, c, g, or t
  misc_feature (40)..(40): n is a, c, g, or t
  misc_feature (45)..(45): n is a, c, g, or t
  misc_feature (53)..(53): n is a, c, g, or t
  misc_feature (61)..(61): n is a, c, g, or t
  misc_feature (64)..(64): n is a, c, g, or t
  misc_feature (66)..(67): n is a, c, g, or t
  misc_feature (70)..(70): n is a, c, g, or t
  misc_feature (73)..(73): n is a, c, g, or t
  misc_feature (78)..(78): n is a, c, g, or t
  misc_feature (80)..(80): n is a, c, g, or t
  misc_feature (82)..(82): n is a, c, g, or t
  misc_feature (88)..(88): n is a, c, g, or t
  misc_feature (106)..(106): n is a, c, g, or t
  misc_feature (112)..(112): n is a, c, g, or t
cnctttgaagnnccaccatcgtacanggganaanacggcnaccanaatccggncaaattcnggngnnctnccngaacncntntttttntttgggtgccaccatcgnaccggncac

SEQ ID NO: 544 - DNA, 159 bp, Unknown Organism
  polynucleotide sequence showing no homology to known genes
  misc_feature (8)..(8): n is a, c, g, or t
  misc_feature (16)..(16): n is a, c, g, or t
  misc_feature (20)..(20): n is a, c, g, or t
  misc_feature (28)..(28): n is a, c, g, or t
  misc_feature (38)..(38): n is a, c, g, or t
  misc_feature (53)..(54): n is a, c, g, or t
  misc_feature (62)..(62): n is a, c, g, or t
  misc_feature (74)..(74): n is a, c, g, or t
  misc_feature (76)..(76): n is a, c, g, or t
  misc_feature (81)..(81): n is a, c, g, or t
  misc_feature (85)..(86): n is a, c, g, or t
  misc_feature (89)..(91): n is a, c, g, or t
  misc_feature (93)..(93): n is a, c, g, or t
  misc_feature (102)..(102): n is a, c, g, or t
  misc_feature (108)..(108): n is a, c, g, or t
  misc_feature (111)..(111): n is a, c, g, or t
  misc_feature (113)..(113): n is a, c, g, or t
  misc_feature (117)..(117): n is a, c, g, or t
  misc_feature (119)..(119): n is a, c, g, or t
  misc_feature (127)..(129): n is a, c, g, or t
  misc_feature (132)..(134): n is a, c, g, or t
  misc_feature (136)..(137): n is a, c, g, or t
  misc_feature (140)..(141): n is a, c, g, or t
  misc_feature (144)..(144): n is a, c, g, or t
  misc_feature (149)..(149): n is a, c, g, or t
  misc_feature (154)..(154): n is a, c, g, or t
  misc_feature (158)..(158): n is a, c, g, or t
bstcctgncaaacccngggnagtcaggnaaacgtccancatggatctggatcnnggcacagngaaggcaacgcnancgacntagnnacnnnangactgtatnaaacanagncnggantnatactgannncannnannagnntangaagnttcanggcnc

SEQ ID NO: 545 - DNA, 565 bp, Unknown Organism
  polynucleotide sequence showing no homology to known genes
  misc_feature (4)..(5): n is a, c, g, or t
  misc_feature (8)..(8): n is a, c, g, or t
  misc_feature (10)..(10): n is a, c, g, or t
  misc_feature (14)..(14): n is a, c, g, or t
  misc_feature (21)..(21): n is a, c, g, or t
  misc_feature (32)..(33): n is a, c, g, or t
  misc_feature (38)..(38): n is a, c, g, or t
  misc_feature (44)..(44): n is a, c, g, or t
  misc_feature (50)..(50): n is a, c, g, or t
  misc_feature (52)..(52): n is a, c, g, or t
  misc_feature (54)..(57): n is a, c, g, or t
  misc_feature (59)..(59): n is a, c, g, or t
  misc_feature (61)..(62): n is a, c, g, or t
  misc_feature (64)..(68): n is a, c, g, or t
  misc_feature (71)..(72): n is a, c, g, or t
  misc_feature (80)..(80): n is a, c, g, or t
  misc_feature (85)..(86): n is a, c, g, or t
  misc_feature (95)..(96): n is a, c, g, or t
  misc_feature (98)..(101): n is a, c, g, or t
  misc_feature (104)..(104): n is a, c, g, or t
  misc_feature (106)..(106): n is a, c, g, or t
  misc_feature (116)..(116): n is a, c, g, or t
  misc_feature (128)..(128): n is a, c, g, or t
  misc_feature (130)..(131): n is a, c, g, or t
  misc_feature (135)..(135): n is a, c, g, or t
  misc_feature (142)..(143): n is a, c, g, or t
  misc_feature (145)..(145): n is a, c, g, or t
  misc_feature (159)..(161): n is a, c, g, or t
  misc_feature (163)..(163): n is a, c, g, or t
  misc_feature (165)..(165): n is a, c, g, or t
  misc_feature (167)..(168): n is a, c, g, or t
  misc_feature (170)..(170): n is a, c, g, or t
  misc_feature (172)..(172): n is a, c, g, or t
  misc_feature (174)..(174): n is a, c, g, or t
  misc_feature (178)..(178): n is a, c, g, or t
  misc_feature (182)..(183): n is a, c, g, or t
  misc_feature (188)..(189): n is a, c, g, or t
  misc_feature (191)..(192): n is a, c, g, or t
  misc_feature (195)..(196): n is a, c, g, or t
  misc_feature (198)..(198): n is a, c, g, or t
  misc_feature (205)..(205): n is a, c, g, or t
  misc_feature (207)..(207): n is a, c, g, or t
  misc_feature (213)..(215): n is a, c, g, or t
  misc_feature (218)..(218): n is a, c, g, or t
  misc_feature (223)..(224): n is a, c, g, or t
  misc_feature (226)..(227): n is a, c, g, or t
  misc_feature (230)..(231): n is a, c, g, or t
  misc_feature (236)..(238): n is a, c, g, or t
  misc_feature (247)..(247): n is a, c, g, or t
  misc_feature (253)..(253): n is a, c, g, or t
  misc_feature (258)..(258): n is a, c, g, or t
  misc_feature (260)..(260): n is a, c, g, or t
  misc_feature (266)..(266): n is a, c, g, or t
  misc_feature (270)..(270): n is a, c, g, or t
  misc_feature (274)..(274): n is a, c, g, or t
  misc_feature (278)..(278): n is a, c, g, or t
  misc_feature (280)..(280): n is a, c, g, or t
  misc_feature (282)..(282): n is a, c, g, or t
  misc_feature (284)..(285): n is a, c, g, or t
  misc_feature (288)..(288): n is a, c, g, or t
  misc_feature (291)..(291): n is a, c, g, or t
  misc_feature (294)..(295): n is a, c, g, or t
  misc_feature (300)..(302): n is a, c, g, or t
  misc_feature (304)..(305): n is a, c, g, or t
  misc_feature (308)..(308): n is a, c, g, or t
  misc_feature (310)..(312): n is a, c, g, or t
  misc_feature (315)..(316): n is a, c, g, or t
  misc_feature (319)..(321): n is a, c, g, or t
  misc_feature (323)..(323): n is a, c, g, or t
  misc_feature (326)..(326): n is a, c, g, or t
  misc_feature (329)..(330): n is a, c, g, or t
  misc_feature (333)..(336): n is a, c, g, or t
  misc_feature (341)..(342): n is a, c, g, or t
  misc_feature (344)..(344): n is a, c, g, or t
  misc_feature (348)..(349): n is a, c, g, or t
  misc_feature (352)..(352): n is a, c, g, or t
  misc_feature (359)..(364): n is a, c, g, or t
  misc_feature (366)..(366): n is a, c, g, or t
  misc_feature (369)..(371): n is a, c, g, or t
  misc_feature (374)..(376): n is a, c, g, or t
  misc_feature (387)..(388): n is a, c, g, or t
  misc_feature (390)..(390): n is a, c, g, or t
  misc_feature (394)..(394): n is a, c, g, or t
  misc_feature (397)..(397): n is a, c, g, or t
  misc_feature (399)..(400): n is a, c, g, or t
  misc_feature (402)..(402): n is a, c, g, or t
  misc_feature (404)..(404): n is a, c, g, or t
  misc_feature (409)..(409): n is a, c, g, or t
  misc_feature (413)..(415): n is a, c, g, or t
  misc_feature (425)..(426): n is a, c, g, or t
  misc_feature (429)..(429): n is a, c, g, or t
  misc_feature (442)..(442): n is a, c, g, or t
  misc_feature (463)..(463): n is a, c, g, or t
  misc_feature (465)..(465): n is a, c, g, or t
  misc_feature (480)..(480): n is a, c, g, or t
  misc_feature (487)..(487): n is a, c, g, or t
  misc_feature (490)..(490): n is a, c, g, or t
  misc_feature (494)..(494): n is a, c, g, or t
  misc_feature (509)..(509): n is a, c, g, or t
  misc_feature (527)..(527): n is a, c, g, or t
ttgnngtngnaggnggaacgnagggcagtttnnttccnagggancaccancnannnngntnntnnnnnaannttttttgntatanncacacgganntnnnnacnancgaggggggnttttttctacantnnattncgtgggnnanaatcaaacgatgannncngngnntncngngganatgnncgacnngnntanngntcgaccncnaccacnnnacnggagnngnnganngtcgnnnctcattaangagagnttaancngagtgnagtnaatnacgncnanannganatntannttttnnncnnggncnnntanntannntnacntannacnnnngtatnntncggnngcnttcccannnnnntntannnctnnntcgaataaganncncggncangnncnantcccngctnnncaaaacacgnnagnggagggtccgcgnaggcagtgaatcccgtgattnanctacaagtgccttgngtgcagntgncaanaacaggaaatacttntggaataagtgatgcatncagaaatgctacttctggctccaaagttgctgactgca

SEQ ID NO: 546 - DNA, 252 bp, Unknown Organism
  polynucleotide sequence showing no homology to known genes
gaggtacatagcagctaccaggcagtgattcaaagtagagctgcattccgttcgtaggccttagaataacttcctagttcctatatactgtttccattttatttcagacagtattgtaattcctttccaaatattgtatttagtataatcccgaagctcatgtacttgtgacttcacatattgggatattcgcgttagatgttggttttagacttattgtgtttgtatcagaattgcctttacgttttgtta

SEQ ID NO: 547 - DNA, 158 bp, Unknown Organism
  polynucleotide sequence showing no homology to known genes
  misc_feature (20)..(20): n is a, c, g, or t
  misc_feature (22)..(22): n is a, c, g, or t
  misc_feature (30)..(30): n is a, c, g, or t
  misc_feature (33)..(33): n is a, c, g, or t
  misc_feature (35)..(35): n is a, c, g, or t
  misc_feature (40)..(40): n is a, c, g, or t
  misc_feature (44)..(45): n is a, c, g, or t
  misc_feature (48)..(48): n is a, c, g, or t
  misc_feature (52)..(53): n is a, c, g, or t
  misc_feature (59)..(59): n is a, c, g, or t
  misc_feature (72)..(72): n is a, c, g, or t
  misc_feature (86)..(90): n is a, c, g, or t
  misc_feature (98)..(98): n is a, c, g, or t
  misc_feature (111)..(112): n is a, c, g, or t
  misc_feature (123)..(123): n is a, c, g, or t
  misc_feature (126)..(126): n is a, c, g, or t
  misc_feature (131)..(131): n is a, c, g, or t
  misc_feature (134)..(135): n is a, c, g, or t
  misc_feature (137)..(137): n is a, c, g, or t
  misc_feature (143)..(143): n is a, c, g, or t
ctctttggaaagccctcatngngtgagaanacnangcggnaaannctnttgnnacgccnattactcaggacncatcatttttttcnnnnncacgctanaagggggactatnnggcctaagganatncaggnggnnangcgtantacgggagaaagggc

SEQ ID NO: 548 - DNA, 67 bp, Unknown Organism
  polynucleotide sequence showing no homology to known genes
  misc_feature (6)..(6): n is a, c, g, or t
  misc_feature (65)..(65): n is a, c, g, or t
cctttngaggcggcatggatgtagcagggaaaggctctaattcttgctcgactccttgggcggcnta

SEQ ID NO: 549 - DNA, 72 bp, Unknown Organism
  polynucleotide sequence showing no homology to known genes
  misc_feature (3)..(3): n is a, c, g, or t
  misc_feature (7)..(7): n is a, c, g, or t
  misc_feature (19)..(20): n is a, c, g, or t
  misc_feature (30)..(30): n is a, c, g, or t
  misc_feature (61)..(61): n is a, c, g, or t
ccnttgntgagcctatctnngttccgaaantgaaaccgacgctaactttctccactagtcngcctttcagta

SEQ ID NO: 550 - DNA, 100 bp, Unknown Organism
  polynucleotide sequence showing no homology to known genes
  misc_feature (7)..(7): n is a, c, g, or t
  misc_feature (41)..(41): n is a, c, g, or t
  misc_feature (43)..(43): n is a, c, g, or t
  misc_feature (47)..(47): n is a, c, g, or t
  misc_feature (58)..(58): n is a, c, g, or t
  misc_feature (69)..(69): n is a, c, g, or t
  misc_feature (71)..(71): n is a, c, g, or t
  misc_feature (73)..(74): n is a, c, g, or t
  misc_feature (80)..(81): n is a, c, g, or t
  misc_feature (90)..(90): n is a, c, g, or t
  misc_feature (93)..(93): n is a, c, g, or t
ctttggnaagaccgcgaagttgaaggacagggagagatgangngcgnctccttagggnacgatccctangncnnaccgcnntcacacagngtntggggta

SEQ ID NO: 551 - DNA, 142 bp, Unknown Organism
  polynucleotide sequence showing no homology to known genes
  misc_feature (4)..(4): n is a, c, g, or t
  misc_feature (7)..(7): n is a, c, g, or t
  misc_feature (29)..(29): n is a, c, g, or t
  misc_feature (35)..(35): n is a, c, g, or t
  misc_feature (38)..(38): n is a, c, g, or t
  misc_feature (76)..(76): n is a, c, g, or t
  misc_feature (114)..(114): n is a, c, g, or t
  misc_feature (125)..(126): n is a, c, g, or t
gttnatnatgcgattctttttctgcctanggtggnagngaccaaggaattgcaggaccaattttttttgggttatntatccctgctctaagggcacttcattggtataggttgnaagtgtaaggnntattgttggctggcta

SEQ ID NO: 552 - DNA, 475 bp, Unknown Organism
  polynucleotide sequence showing no homology to known genes
  misc_feature (4)..(5): n is a, c, g, or t
  misc_feature (9)..(9): n is a, c, g, or t
  misc_feature (13)..(14): n is a, c, g, or t
  misc_feature (34)..(34): n is a, c, g, or t
  misc_feature (42)..(42): n is a, c, g, or t
  misc_feature (50)..(50): n is a, c, g, or t
  misc_feature (55)..(55): n is a, c, g, or t
  misc_feature (61)..(61): n is a, c, g, or t
  misc_feature (75)..(76): n is a, c, g, or t
  misc_feature (83)..(83): n is a, c, g, or t
  misc_feature (87)..(87): n is a, c, g, or t
  misc_feature (96)..(96): n is a, c, g, or t
  misc_feature (102)..(102): n is a, c, g, or t
  misc_feature (104)..(104): n is a, c, g, or t
  misc_feature (113)..(114): n is a, c, g, or t
  misc_feature (117)..(117): n is a, c, g, or t
  misc_feature (125)..(125): n is a, c, g, or t
  misc_feature (132)..(132): n is a, c, g, or t
  misc_feature (136)..(136): n is a, c, g, or t
  misc_feature (140)..(140): n is a, c, g, or t
  misc_feature (148)..(148): n is a, c, g, or t
  misc_feature (150)..(150): n is a, c, g, or t
  misc_feature (156)..(156): n is a, c, g, or t
  misc_feature (158)..(158): n is a, c, g, or t
  misc_feature (160)..(160): n is a, c, g, or t
  misc_feature (162)..(162): n is a, c, g, or t
  misc_feature (169)..(169): n is a, c, g, or t
  misc_feature (174)..(174): n is a, c, g, or t
  misc_feature (181)..(181): n is a, c, g, or t
  misc_feature (183)..(183): n is a, c, g, or t
  misc_feature (185)..(185): n is a, c, g, or t
  misc_feature (190)..(190): n is a, c, g, or t
  misc_feature (194)..(194): n is a, c, g, or t
  misc_feature (198)..(199): n is a, c, g, or t
  misc_feature (204)..(205): n is a, c, g, or t
  misc_feature (207)..(208): n is a, c, g, or t
  misc_feature (213)..(213): n is a, c, g, or t
  misc_feature (218)..(219): n is a, c, g, or t
  misc_feature (224)..(224): n is a, c, g, or t
  misc_feature (226)..(226): n is a, c, g, or t
  misc_feature (229)..(229): n is a, c, g, or t
  misc_feature (236)..(236): n is a, c, g, or t
  misc_feature (249)..(249): n is a, c, g, or t
  misc_feature (251)..(251): n is a, c, g, or t
  misc_feature (253)..(253): n is a, c, g, or t
  misc_feature (256)..(257): n is a, c, g, or t
  misc_feature (259)..(259): n is a, c, g, or t
  misc_feature (261)..(261): n is a, c, g, or t
  misc_feature (266)..(266): n is a, c, g, or t
  misc_feature (269)..(271): n is a, c, g, or t
  misc_feature (274)..(274): n is a, c, g, or t
  misc_feature (277)..(277): n is a, c, g, or t
  misc_feature (280)..(281): n is a, c, g, or t
  misc_feature (283)..(283): n is a, c, g, or t
  misc_feature (285)..(285): n is a, c, g, or t
  misc_feature (288)..(288): n is a, c, g, or t
  misc_feature (291)..(293): n is a, c, g, or t
  misc_feature (296)..(296): n is a, c, g, or t
  misc_feature (308)..(308): n is a, c, g, or t
  misc_feature (318)..(318): n is a, c, g, or t
  misc_feature (321)..(321): n is a, c, g, or t
  misc_feature (324)..(325): n is a, c, g, or t
  misc_feature (376)..(376): n is a, c, g, or t
gaanncccngacnnatttgggaaaaccacctgangaagaaangatatgtngcatntaaagntgacttatgagtannaggctangatntgttaccanacccgngntggtaatcnnagnactatatngaacatnttanttgnaccttctnantacatnancngntatgagnaccantattacncngnacttnattnacanntgcgnngnnagganattannggtgncnctngatcganttctgactcatantntnacnnancnaatgnacnnntcnaangtnntnanatnatnnntcncgtgaatcgagntttagctatngcngcnnaccacgtgaagaagaaatgatttgttgcacgtaaagctgacttatgagacngaggttatgatatgttaccatacccgagtttgtaatcttcgcactatattgaacatctagttgtagcagttttttttatcatctgctatttgtgcatta

SEQ ID NO: 553 - DNA, 129 bp, Unknown Organism
  polynucleotide sequence showing no homology to known genes
  misc_feature (2)..(2): n is a, c, g, or t
  misc_feature (8)..(8): n is a, c, g, or t
tnaaaaanaatggatagcactaacacaaaggcggcaagttcaagaccagctttgcagacacttccagaaaatcgcttgatgggtgaaactgagaagtgaggcttacaaggcaaaccattttgccataca

SEQ ID NO: 554 - DNA, 70 bp, Unknown Organism
  polynucleotide sequence showing no homology to known genes
  misc_feature (6)..(6): n is a, c, g, or t
  misc_feature (11)..(11): n is a, c, g, or t
  misc_feature (22)..(22): n is a, c, g, or t
  misc_feature (25)..(25): n is a, c, g, or t
  misc_feature (27)..(27): n is a, c, g, or t
  misc_feature (34)..(34): n is a, c, g, or t
  misc_feature (37)..(37): n is a, c, g, or t
  misc_feature (41)..(41): n is a, c, g, or t
  misc_feature (44)..(44): n is a, c, g, or t
  misc_feature (49)..(49): n is a, c, g, or t
  misc_feature (51)..(51): n is a, c, g, or t
  misc_feature (58)..(58): n is a, c, g, or t
tgcccngtgcntggttgtggcnagngngctagangantccngangaggngnagaccgngaaacccaccga

SEQ ID NO: 555 - DNA, 86 bp, Unknown Organism
  polynucleotide sequence showing no homology to known genes
  misc_feature (14)..(15): n is a, c, g, or t
  misc_feature (21)..(23): n is a, c, g, or t
  misc_feature (28)..(28): n is a, c, g, or t
  misc_feature (31)..(31): n is a, c, g, or t
  misc_feature (34)..(34): n is a, c, g, or t
  misc_feature (45)..(45): n is a, c, g, or t
  misc_feature (50)..(50): n is a, c, g, or t
  misc_feature (74)..(74): n is a, c, g, or t
  misc_feature (76)..(77): n is a, c, g, or t
  misc_feature (84)..(84): n is a, c, g, or t
ctttggaagggccnnaagctnnngggantcngcnataggggaatnaaccnatgtgcatgcaacaaacaagccgntnnatgtcanga

SEQ ID NO: 556 - DNA, 103 bp, Unknown Organism
  polynucleotide sequence showing no homology to known genes
  misc_feature (7)..(8): n is a, c, g, or t
  misc_feature (12)..(12): n is a, c, g, or t
  misc_feature (25)..(25): n is a, c, g, or t
  misc_feature (35)..(35): n is a, c, g, or t
  misc_feature (55)..(55): n is a, c, g, or t
  misc_feature (58)..(58): n is a, c, g, or t
  misc_feature (73)..(73): n is a, c, g, or t
  misc_feature (78)..(78): n is a, c, g, or t
cttcgtnnagancagggattgttgntttccagcgnacgattcgaggttcggattnggnatttcgatgtctcantccangggattgttgctttgtttagcccga

SEQ ID NO: 557 - DNA, 131 bp, Unknown Organism
  polynucleotide sequence showing no homology to known genes
  misc_feature (2)..(2): n is a, c, g, or t
  misc_feature (5)..(5): n is a, c, g, or t
  misc_feature (7)..(7): n is a, c, g, or t
  misc_feature (9)..(9): n is a, c, g, or t
  misc_feature (14)..(14): n is a, c, g, or t
  misc_feature (21)..(21): n is a, c, g, or t
  misc_feature (23)..(23): n is a, c, g, or t
  misc_feature (28)..(30): n is a, c, g, or t
  misc_feature (32)..(32): n is a, c, g, or t
  misc_feature (39)..(39): n is a, c, g, or t
  misc_feature (52)..(52): n is a, c, g, or t
  misc_feature (57)..(59): n is a, c, g, or t
  misc_feature (71)..(71): n is a, c, g, or t
  misc_feature (83)..(83): n is a, c, g, or t
  misc_feature (85)..(86): n is a, c, g, or t
  misc_feature (89)..(90): n is a, c, g, or t
  misc_feature (93)..(93): n is a, c, g, or t
  misc_feature (105)..(105): n is a, c, g, or t
  misc_feature (125)..(126): n is a, c, g, or t
cntgncntnccgcngctcctncngtgannncngctgctntacggagctgatnctgtnnntgtcaaggaggncgacacaggtangnnccnncgngaaagtgtgtanatgacaatatcaagattgtnnggaga

SEQ ID NO: 558 - DNA, 172 bp, Unknown Organism
  polynucleotide sequence showing no homology to known genes
  misc_feature (8)..(8): n is a, c, g, or t
  misc_feature (10)..(10): n is a, c, g, or t
  misc_feature (22)..(22): n is a, c, g, or t
  misc_feature (26)..(26): n is a, c, g, or t
  misc_feature (44)..(44): n is a, c, g, or t
  misc_feature (59)..(61): n is a, c, g, or t
  misc_feature (64)..(65): n is a, c, g, or t
  misc_feature (76)..(76): n is a, c, g, or t
  misc_feature (79)..(79): n is a, c, g, or t
  misc_feature (84)..(84): n is a, c, g, or t
  misc_feature (86)..(87): n is a, c, g, or t
  misc_feature (91)..(91): n is a, c, g, or t
  misc_feature (96)..(96): n is a, c, g, or t
  misc_feature (105)..(105): n is a, c, g, or t
  misc_feature (109)..(110): n is a, c, g, or t
  misc_feature (113)..(113): n is a, c, g, or t
  misc_feature (116)..(116): n is a, c, g, or t
  misc_feature (118)..(118): n is a, c, g, or t
  misc_feature (127)..(127): n is a, c, g, or t
  misc_feature (131)..(131): n is a, c, g, or t
  misc_feature (138)..(138): n is a, c, g, or t
  misc_feature (144)..(144): n is a, c, g, or t
  misc_feature (152)..(152): n is a, c, g, or t
  misc_feature (162)..(162): n is a, c, g, or t
  misc_feature (164)..(164): n is a, c, g, or t
ctttgganantccgaagagatnaggnagacgaccctgatcctgnaggctgagcaagaannnagnncacaatgagcnatngctangnnagcngacangcaaactanctcnnaanctntnctggtgatnccgntgatcanggaggnagccttcnaccagacagncntgacagga

SEQ ID NO: 559 - DNA, 66 bp, Unknown Organism
  polynucleotide sequence showing no homology to known genes
  misc_feature (2)..(2): n is a, c, g, or t
  misc_feature (6)..(6): n is a, c, g, or t
  misc_feature (8)..(8): n is a, c, g, or t
cncttngncacagccctatttgtatttatgtttgaattttatgacaaaatggtcgtatttttctca

SEQ ID NO: 560 - DNA, 113 bp, Unknown Organism
  polynucleotide sequence showing no homology to known genes
  misc_feature (11)..(11): n is a, c, g, or t
  misc_feature (14)..(14): n is a, c, g, or t
  misc_feature (33)..(34): n is a, c, g, or t
  misc_feature (38)..(38): n is a, c, g, or t
  misc_feature (60)..(60): n is a, c, g, or t
  misc_feature (82)..(82): n is a, c, g, or t
  misc_feature (84)..(84): n is a, c, g, or t
  misc_feature (95)..(95): n is a, c, g, or t
acgacgcgtanaanatctgaaggatacctatgnncaancgaaccaatgcacggatatccntttataacccaaatcttcagtngngaatatctctncagttccttttctattgc

SEQ ID NO: 561 - DNA, 111 bp, Unknown Organism
  polynucleotide sequence showing no homology to known genes
  misc_feature (8)..(8): n is a, c, g, or t
  misc_feature (15)..(16): n is a, c, g, or t
  misc_feature (39)..(39): n is a, c, g, or t
  misc_feature (59)..(59): n is a, c, g, or t
  misc_feature (102)..(103): n is a, c, g, or t
cgagtttnatggcgnngcgatgtggacattcgttgtggnggcctaatgctgaaaagggntattgatatggcaagaggaaccctctgcaatgcagaaattganngtggctcc

SEQ ID NO: 562 - DNA, 58 bp, Unknown Organism
  polynucleotide sequence showing no homology to known genes
  misc_feature (3)..(3): n is a, c, g, or t
  misc_feature (11)..(11): n is a, c, g, or t
  misc_feature (13)..(13): n is a, c, g, or t
  misc_feature (30)..(31): n is a, c, g, or t
  misc_feature (33)..(33): n is a, c, g, or t
  misc_feature (44)..(44): n is a, c, g, or t
  misc_feature (46)..(46): n is a, c, g, or t
acntgacttcntncaaccagccatctatannanaggaaaaatantntgaggattccca

SEQ ID NO: 563 - DNA, 242 bp, Unknown Organism
  polynucleotide sequence showing no homology to known genes
  misc_feature (7)..(7): n is a, c, g, or t
  misc_feature (12)..(12): n is a, c, g, or t
  misc_feature (15)..(15): n is a, c, g, or t
  misc_feature (21)..(21): n is a, c, g, or t
  misc_feature (26)..(26): n is a, c, g, or t
  misc_feature (30)..(30): n is a, c, g, or t
  misc_feature (32)..(32): n is a, c, g, or t
  misc_feature (39)..(40): n is a, c, g, or t
  misc_feature (42)..(42): n is a, c, g, or t
  misc_feature (47)..(47): n is a, c, g, or t
  misc_feature (50)..(50): n is a, c, g, or t
  misc_feature (55)..(55): n is a, c, g, or t
  misc_feature (63)..(64): n is a, c, g, or t
  misc_feature (77)..(77): n is a, c, g, or t
  misc_feature (81)..(81): n is a, c, g, or t
  misc_feature (85)..(85): n is a, c, g, or t
  misc_feature (99)..(99): n is a, c, g, or t
  misc_feature (103)..(103): n is a, c, g, or t
  misc_feature (116)..(116): n is a, c, g, or t
  misc_feature (128)..(128): n is a, c, g, or t
  misc_feature (140)..(140): n is a, c, g, or t
  misc_feature (151)..(152): n is a, c, g, or t
  misc_feature (161)..(161): n is a, c, g, or t
  misc_feature (168)..(168): n is a, c, g, or t
  misc_feature (172)..(172): n is a, c, g, or t
  misc_feature (174)..(175): n is a, c, g, or t
  misc_feature (180)..(180): n is a, c, g, or t
  misc_feature (184)..(184): n is a, c, g, or t
  misc_feature (187)..(187): n is a, c, g, or t
  misc_feature (189)..(190): n is a, c, g, or t
  misc_feature (192)..(193): n is a, c, g, or t
  misc_feature (201)..(201): n is a, c, g, or t
  misc_feature (208)..(208): n is a, c, g, or t
  misc_feature (211)..(211): n is a, c, g, or t
  misc_feature (215)..(215): n is a, c, g, or t
  misc_feature (220)..(221): n is a, c, g, or t
  misc_feature (229)..(229): n is a, c, g, or t
  misc_feature (236)..(236): n is a, c, g, or t
ctgtccnttttntgngacctngtgcnggcntnctctganngngcccngtnagcgnccaactcnnatcaagctccttncaantgantgaggacatgatgnggtnatttactcgtgangaaaggcagctnattcctgacccnatggaagcagnnaggaaatcngctcctngctncnnactgngcanggntnnanngtactcgnccatacngangtcncacannattgctanattgttnctagca

SEQ ID NO: 564 - DNA, 157 bp, Unknown Organism
  polynucleotide sequence showing no homology to known genes
  misc_feature (1)..(1): n is a, c, g, or t
  misc_feature (37)..(37): n is a, c, g, or t
  misc_feature (94)..(94): n is a, c, g, or t
nctggcagtaccaaaggtcctatggattgttacttcncgcaaaaatctggagataaggaaggaaaaagtggtaatcctcaaattgatgccaaancgattttgagggatcgtgcaattacaatgtttgcgcggtggatgtatgatgcaggtcttcctt

SEQ ID NO: 565 - DNA, 167 bp, Unknown Organism
  polynucleotide sequence showing no homology to known genes
  misc_feature (2)..(3): n is a, c, g, or t
  misc_feature (20)..(20): n is a, c, g, or t
  misc_feature (22)..(22): n is a, c, g, or t
  misc_feature (26)..(26): n is a, c, g, or t
  misc_feature (32)..(32): n is a, c, g, or t
  misc_feature (35)..(35): n is a, c, g, or t
  misc_feature (45)..(46): n is a, c, g, or t
  misc_feature (50)..(50): n is a, c, g, or t
  misc_feature (52)..(52): n is a, c, g, or t
  misc_feature (57)..(57): n is a, c, g, or t
  misc_feature (62)..(62): n is a, c, g, or t
  misc_feature (66)..(69): n is a, c, g, or t
  misc_feature (72)..(72): n is a, c, g, or t
  misc_feature (76)..(76): n is a, c, g, or t
  misc_feature (81)..(81): n is a, c, g, or t
  misc_feature (96)..(96): n is a, c, g, or t
  misc_feature (106)..(106): n is a, c, g, or t
  misc_feature (112)..(112): n is a, c, g, or t
  misc_feature (115)..(115): n is a, c, g, or t
  misc_feature (119)..(119): n is a, c, g, or t
  misc_feature (128)..(128): n is a, c, g, or t
  misc_feature (136)..(137): n is a, c, g, or t
gnngctagcagctcggagtntnttgnggtccngcngaaatttttnntggngnacacnggaanttgnnnnatntctnatggngtatggtaagaactnattttttganattganggncganatgttcttngggggggnnccgtcacacctgtcacttcatttcattttt

SEQ ID NO: 566 - DNA, 24 bp, Unknown Organism
  polynucleotide sequence showing no homology to known genes
aaaggaaactagttggaacttgtt

SEQ ID NO: 567 - DNA, 34 bp, Unknown Organism
  polynucleotide sequence showing no homology to known genes
aagatgatgagcagattgcaaggaggaagcacct

SEQ ID NO: 568 - DNA, 71 bp, Unknown Organism
  polynucleotide sequence showing no homology to known genes
actacgactggcaaagatcaagttgtagtaactaataaatactcgagagagaacagtggaaatctttttgt

SEQ ID NO: 569 - DNA, 103 bp, Unknown Organism
  polynucleotide sequence showing no homology to known genes
  misc_feature (2)..(2): n is a, c, g, or t
  misc_feature (5)..(5): n is a, c, g, or t
  misc_feature (7)..(7): n is a, c, g, or t
  misc_feature (14)..(14): n is a, c, g, or t
  misc_feature (17)..(17): n is a, c, g, or t
  misc_feature (24)..(24): n is a, c, g, or t
  misc_feature (27)..(27): n is a, c, g, or t
  misc_feature (38)..(38): n is a, c, g, or t
  misc_feature (76)..(76): n is a, c, g, or t
  misc_feature (80)..(80): n is a, c, g, or t
  misc_feature (93)..(93): n is a, c, g, or t
  misc_feature (96)..(96): n is a, c, g, or t
tncangncgctgcncangttcctnggnaaacaggccgncttgggttgtactcaggtactcatgaaacttgtatagngctngtaagaagtttgngtngttcggt

SEQ ID NO: 570 - DNA, 225 bp, Unknown Organism
  polynucleotide sequence showing no homology to known genes
  misc_feature (6)..(6): n is a, c, g, or t
  misc_feature (8)..(8): n is a, c, g, or t
  misc_feature (17)..(17): n is a, c, g, or t
  misc_feature (22)..(22): n is a, c, g, or t
  misc_feature (32)..(32): n is a, c, g, or t
  misc_feature (37)..(37): n is a, c, g, or t
  misc_feature (49)..(49): n is a, c, g, or t
  misc_feature (52)..(52): n is a, c, g, or t
  misc_feature (62)..(62): n is a, c, g, or t
  misc_feature (64)..(64): n is a, c, g, or t
  misc_feature (69)..(69): n is a, c, g, or t
  misc_feature (71)..(71): n is a, c, g, or t
  misc_feature (75)..(77): n is a, c, g, or t
  misc_feature (89)..(90): n is a, c, g, or t
  misc_feature (98)..(98): n is a, c, g, or t
  misc_feature (101)..(101): n is a, c, g, or t
  misc_feature (103)..(104): n is a, c, g, or t
  misc_feature (107)..(108): n is a, c, g, or t
  misc_feature (111)..(111): n is a, c, g, or t
  misc_feature (118)..(118): n is a, c, g, or t
  misc_feature (132)..(132): n is a, c, g, or t
  misc_feature (134)..(134): n is a, c, g, or t
  misc_feature (146)..(147): n is a, c, g, or t
  misc_feature (171)..(171): n is a, c, g, or t
  misc_feature (175)..(175): n is a, c, g, or t
  misc_feature (191)..(191): n is a, c, g, or t
  misc_feature (215)..(215): n is a, c, g, or t
ctggcngnaccaaaggncctgnagcccggtanattcncccctgtagctncanacttcctgantntactntngatnnnacattatggggnnagaccacnatntnnatnntcntcagctngtgacttcatgagntntcttggccatgnnaagctaagacatcaatatgtgagngcgntcacgagcatatgccngagcagacattcatagagactctnttattagtgg

SEQ ID NO: 571 - DNA, 114 bp, Unknown Organism
  polynucleotide sequence showing no homology to known genes
  misc_feature (10)..(11): n is a, c, g, or t
tttctgctgnntcagtgaggttagatcgtaatggagcactttttatggagaacatcaaacaagaagttgaaagtattgatgctgatgtaacaccttctcgaatacaaactgcct

SEQ ID NO: 572 - DNA, 199 bp, Unknown Organism
  polynucleotide sequence showing no homology to known genes
  misc_feature (9)..(9): n is a, c, g, or t
  misc_feature (19)..(19): n is a, c, g, or t
  misc_feature (29)..(29): n is a, c, g, or t
  misc_feature (41)..(42): n is a, c, g, or t
tttgcatgncttcgaaggncagtgcttgntctgaacccgtnncttggacttgacaactagcatcttctctttgcatgctgccctcatgtattgccaatgtaatttctcctctagcaaaccattatgtattacaaactattattatgattgtgaataacttgtgaaaagttcaatcaatctgaaagaaagtaatctctct

SEQ ID NO: 573 - DNA, 91 bp, Unknown Organism
  polynucleotide sequence showing no homology to known genes
  misc_feature (3)..(3): n is a, c, g, or t
ggnttctaatttctaagttgatggctcaaccaaagatatttagtactgaactgattgtactaattgttctataaaattacggggtttagat

SEQ ID NO: 574 - DNA, 182 bp, Unknown Organism
  polynucleotide sequence showing no homology to known genes
  misc_feature (9)..(9): n is a, c, g, or t
  misc_feature (27)..(27): n is a, c, g, or t
atatgatgnagtccggaagatcgaatntggggaaggtccttctgggatcaaataggctagatttacttgtttttcctaaaaatgtaataaggccaagtgccagtagtgacttattttattattttagtgtcgttttgggattcgtctatttttatattatgaaatgaagcatttattggcat

SEQ ID NO: 575 - DNA, 68 bp, Unknown Organism
  polynucleotide sequence showing no homology to known genes
  misc_feature (12)..(12): n is a, c, g, or t
  misc_feature (21)..(21): n is a, c, g, or t
  misc_feature (43)..(43): n is a, c, g, or t
  misc_feature (48)..(48): n is a, c, g, or t
  misc_feature (54)..(54): n is a, c, g, or t
tttagctacganggttctctncgagattatattctcaacgctnatgcncacgcntttgcttctcgtgt

SEQ ID NO: 576 - DNA, 186 bp, Unknown Organism
  polynucleotide sequence showing no homology to known genes
  misc_feature (4)..(4): n is a, c, g, or t
  misc_feature (8)..(8): n is a, c, g, or t
  misc_feature (22)..(22): n is a, c, g, or t
  misc_feature (26)..(26): n is a, c, g, or t
  misc_feature (46)..(46): n is a, c, g, or t
  misc_feature (69)..(69): n is a, c, g, or t
  misc_feature (91)..(92): n is a, c, g, or t
  misc_feature (98)..(98): n is a, c, g, or t
  misc_feature (100)..(100): n is a, c, g, or t
  misc_feature (104)..(104): n is a, c, g, or t
  misc_feature (108)..(110): n is a, c, g, or t
  misc_feature (130)..(130): n is a, c, g, or t
  misc_feature (136)..(136): n is a, c, g, or t
  misc_feature (156)..(156): n is a, c, g, or t
cagngctngagctgaacccggngctnggacttgacaactagcatcntctctttgcatgctgccctcatntattgccaatgtaatttctccnntagcanancatnatgnnntacaaactattattatgatngtgaanaactcagtgaaacgttcaancaatctgaaagaaagtaatctctctttcct

SEQ ID NO: 577 - DNA, 216 bp, Unknown Organism
  polynucleotide sequence showing no homology to known genes
  misc_feature (7)..(7): n is a, c, g, or t
  misc_feature (11)..(11): n is a, c, g, or t
  misc_feature (13)..(13): n is a, c, g, or t
  misc_feature (24)..(24): n is a, c, g, or t
  misc_feature (59)..(59): n is a, c, g, or t
  misc_feature (66)..(66): n is a, c, g, or t
  misc_feature (70)..(70): n is a, c, g, or t
gggaggnaaantngccctgaaacntaagaggctgagacttgtcataaagaaacaaactntattcangcangagaagaaagcagtaaggaaaatcagcaaaatagcaatgaggttagcaaagttattgataacaacggagggaccaaggatgtacaacacaagaaggagaacatgaacaaaagagctatgaccactggaaaaattgagcagatcatg

SEQ ID NO: 578 - DNA, 63 bp, Unknown Organism
  polynucleotide sequence showing no homology to known genes
atacgaaggttcagtgctagtagctgaaccccgttgcttgggaattgatagtttgggtgacag

SEQ ID NO: 579 - DNA, 99 bp, Unknown Organism
  polynucleotide sequence showing no homology to known genes
  misc_feature (12)..(12): n is a, c, g, or t
agaaatctgccnggtttgcatggatataagcaaatgctcaagaatggtgcttgggaacagtgcatgtctgccttggagccctctgtgaagggcaagctg

SEQ ID NO: 580 - DNA, 126 bp, Unknown Organism
  polynucleotide sequence showing no homology to known genes
  misc_feature (18)..(18): n is a, c, g, or t
  misc_feature (25)..(27): n is a, c, g, or t
  misc_feature (34)..(34): n is a, c, g, or t
  misc_feature (43)..(43): n is a, c, g, or t
  misc_feature (60)..(60): n is a, c, g, or t
  misc_feature (62)..(62): n is a, c, g, or t
  misc_feature (67)..(67): n is a, c, g, or t
  misc_feature (86)..(86): n is a, c, g, or t
  misc_feature (116)..(117): n is a, c, g, or t
  misc_feature (124)..(124): n is a, c, g, or t
gctcaaggggaggtggcnccagagnnnagtgcgnggttggggnaaagggtgcagattctncnaaggnccgtcaaaagagcccatgnccaacaatttactaatgattcacaagagcnntgggggngg

SEQ ID NO: 581 - DNA, 142 bp, Unknown Organism
  polynucleotide sequence showing no homology to known genes
  misc_feature (1)..(1): n is a, c, g, or t
  misc_feature (17)..(18): n is a, c, g, or t
  misc_feature (20)..(20): n is a, c, g, or t
  misc_feature (23)..(23): n is a, c, g, or t
  misc_feature (25)..(25): n is a, c, g, or t
  misc_feature (28)..(29): n is a, c, g, or t
  misc_feature (44)..(44): n is a, c, g, or t
  misc_feature (46)..(46): n is a, c, g, or t
  misc_feature (50)..(50): n is a, c, g, or t
  misc_feature (62)..(62): n is a, c, g, or t
  misc_feature (68)..(68): n is a, c, g, or t
  misc_feature (74)..(74): n is a, c, g, or t
  misc_feature (77)..(78): n is a, c, g, or t
  misc_feature (80)..(80): n is a, c, g, or t
  misc_feature (86)..(86): n is a, c, g, or t
  misc_feature (91)..(91): n is a, c, g, or t
  misc_feature (93)..(93): n is a, c, g, or t
  misc_feature (101)..(101): n is a, c, g, or t
  misc_feature (112)..(112): n is a, c, g, or t
  misc_feature (127)..(127): n is a, c, g, or t
  misc_feature (139)..(139): n is a, c, g, or t
natgtgtattcctgaannanctnantgnncaattattcaaccantnattntaccaagttcantgttanccagantanncntcattnatctntntacatgcntcactaagatnttatttgtaacaagnggttttgttggntgg

SEQ ID NO: 582 - DNA, 189 bp, Unknown Organism
  polynucleotide sequence showing no homology to known genes
gctctaaaaccaacctttatcagtcagaaatcagctttcaaactccataaacacagcagtttggttttcttcaccatcgattctattttccggtcgcggttcgtcacattttttgagttcaaagctatcaaacaattgaattttagacttatttgaggtttatttctccctttccgctattatttttgg

SEQ ID NO: 583 - DNA, 307 bp, Unknown Organism
  polynucleotide sequence showing no homology to known genes
  misc_feature (28)..(28): n is a, c, g, or t
tctatcacaatagagtcctttgctcggngaagagatggggcacatcaagccacattatccactcatcacaatagtagaggccacacacagagaggaaatgcgccaaaaggagctgctgtatatacacatcaaagttataggaagcatgcatcaggaagaggaaatgggcttgttggagctgctctacattctcgtcagaataatatgggcatgggcagaggacaagtgccaaatggtgttcctcaactcaatcatcgcaatgtgggaggtcaatttcgcggacgcgaagcaaagaattcccatttgg

SEQ ID NO: 584 - DNA, 55 bp, Unknown Organism
  polynucleotide sequence showing no homology to known genes
  misc_feature (1)..(1): n is a, c, g, or t
  misc_feature (8)..(8): n is a, c, g, or t
  misc_feature (19)..(19): n is a, c, g, or t
nggaaggngtttggtgtangggtggggggattggggtggaccccaggtggggggg

SEQ ID NO: 585 - DNA, 68 bp, Unknown Organism
  polynucleotide sequence showing no homology to known genes
  misc_feature (4)..(4): n is a, c, g, or t
  misc_feature (13)..(13): n is a, c, g, or t
  misc_feature (18)..(18): n is a, c, g, or t
  misc_feature (27)..(29): n is a, c, g, or t
  misc_feature (33)..(33): n is a, c, g, or t
  misc_feature (56)..(57): n is a, c, g, or t
  misc_feature (66)..(66): n is a, c, g, or t
aaangaggaaaantaatntatggctannnacanatgacaaggacataaggtaactnngcattctancc

SEQ ID NO: 586 - DNA, 121 bp, Unknown Organism
  polynucleotide sequence showing no homology to known genes
  misc_feature (11)..(11): n is a, c, g, or t
  misc_feature (23)..(23): n is a, c, g, or t
  misc_feature (31)..(31): n is a, c, g, or t
  misc_feature (33)..(33): n is a, c, g, or t
  misc_feature (44)..(45): n is a, c, g, or t
  misc_feature (72)..(72): n is a, c, g, or t
  misc_feature (87)..(87): n is a, c, g, or t
tttggctgccntttgctaatccnttgcagtntntgtgcataatnngagtaggggtatgaagatgcccacctnttgttcattcacttnaaggataattacaagccaactatggaatgtgacg

SEQ ID NO: 587 - DNA, 132 bp, Unknown Organism
  polynucleotide sequence showing no homology to known genes
  misc_feature (4)..(4): n is a, c, g, or t
agantagaatgttgtaagagtattgaactcaaagcagtattgtaagtttgtaagtaagttgaaagtattgaactaaaggctcgaggtattcaactcgaagtagtggtgtaaaagtattgaattggaagtgcg

SEQ ID NO: 588 - DNA, 124 bp, Unknown Organism
  polynucleotide sequence showing no homology to known genes
cccctcatttcacacattcttgaaaccaggtgcacttgcccaaatcaggtactccaaaatctctgctaaatcaaggttgaaaactgttcagtccctgtttgctatttatagtcaacaaattccc

SEQ ID NO: 589 - DNA, 153 bp, Unknown Organism
  polynucleotide sequence showing no homology to known genes
  misc_feature (9)..(9): n is a, c, g, or t
  misc_feature (33)..(33): n is a, c, g, or t
  misc_feature (37)..(38): n is a, c, g, or t
  misc_feature (42)..(42): n is a, c, g, or t
  misc_feature (44)..(44): n is a, c, g, or t
  misc_feature (46)..(46): n is a, c, g, or t
  misc_feature (49)..(49): n is a, c, g, or t
  misc_feature (60)..(60): n is a, c, g, or t
  misc_feature (74)..(74): n is a, c, g, or t
  misc_feature (78)..(78): n is a, c, g, or t
  misc_feature (88)..(88): n is a, c, g, or t
  misc_feature (96)..(96): n is a, c, g, or t
  misc_feature (101)..(102): n is a, c, g, or t
  misc_feature (105)..(105): n is a, c, g, or t
  misc_feature (113)..(113): n is a, c, g, or t
  misc_feature (126)..(126): n is a, c, g, or t
tttgggaancttttggaaggtcccatatacgtntttnncaantnanccnggggccttctnggttttttttatgntttnatacgtcggnttgagaanattgnntgnttacaagnaggtgaggaatanataatatgattccttatcttctttgcg

SEQ ID NO: 590 - DNA, 147 bp, Unknown Organism
  polynucleotide sequence showing no homology to known genes
  misc_feature (51)..(51): n is a, c, g, or t
cagcggaatgccaccgaggcgataccagcgatgctgcacgtgatggcatgntctgcttcggcgcgacctggggcagaatagaggaatccggtatagcgcttctcgcccaaccggtactgtgcgaggaagctaatcttattcatgccg

SEQ ID NO: 591 - DNA, 194 bp, Unknown Organism
  polynucleotide sequence showing no homology to known genes
  misc_feature (5)..(5): n is a, c, g, or t
  misc_feature (17)..(17): n is a, c, g, or t
  misc_feature (19)..(20): n is a, c, g, or t
  misc_feature (25)..(25): n is a, c, g, or t
  misc_feature (28)..(29): n is a, c, g, or t
  misc_feature (32)..(32): n is a, c, g, or t
  misc_feature (36)..(36): n is a, c, g, or t
  misc_feature (45)..(45): n is a, c, g, or t
  misc_feature (47)..(48): n is a, c, g, or t
  misc_feature (51)..(51): n is a, c, g, or t
  misc_feature (55)..(55): n is a, c, g, or t
  misc_feature (58)..(58): n is a, c, g, or t
  misc_feature (61)..(61): n is a, c, g, or t
  misc_feature (63)..(64): n is a, c, g, or t
  misc_feature (71)..(71): n is a, c, g, or t
  misc_feature (78)..(78): n is a, c, g, or t
  misc_feature (81)..(81): n is a, c, g, or t
  misc_feature (85)..(85): n is a, c, g, or t
  misc_feature (97)..(97): n is a, c, g, or t
  misc_feature (121)..(121): n is a, c, g, or t
  misc_feature (134)..(134): n is a, c, g, or t
  misc_feature (137)..(137): n is a, c, g, or t
  misc_feature (144)..(144): n is a, c, g, or t
  misc_feature (152)..(152): n is a, c, g, or t
  misc_feature (178)..(178): n is a, c, g, or t
  misc_feature (187)..(187): n is a, c, g, or t
ggccngtagttgggctngnnacgcnccnnagnaccnactggcccngnnaangagnatnagntnntcatgcnttatacnggnactnacaacccaccanccatgccatagcaaagaagcgagntataaacacaagntcnggacctntgcctatnccaatcaaaatttacaaagccacggntacaaactnctaaacg

SEQ ID NO: 592 - DNA, 81 bp, Unknown Organism
  polynucleotide sequence showing no homology to known genes
  misc_feature (4)..(6): n is a, c, g, or t
  misc_feature (13)..(13): n is a, c, g, or t
  misc_feature (15)..(16): n is a, c, g, or t
  misc_feature (21)..(21): n is a, c, g, or t
tttnnncctttcntnncatgntatacgaaggtcagtgctagagctgaacccgttgcttggaattgatagtttgggtgacag

SEQ ID NO: 593 - DNA, 85 bp, Unknown Organism
  polynucleotide sequence showing no homology to known genes
  misc_feature (15)..(15): n is a, c, g, or t
  misc_feature (19)..(20): n is a, c, g, or t
  misc_feature (22)..(22): n is a, c, g, or t
  misc_feature (24)..(24): n is a, c, g, or t
  misc_feature (31)..(31): n is a, c, g, or t
  misc_feature (39)..(39): n is a, c, g, or t
  misc_feature (43)..(43): n is a, c, g, or t
  misc_feature (46)..(46): n is a, c, g, or t
  misc_feature (54)..(54): n is a, c, g, or t
  misc_feature (60)..(60): n is a, c, g, or t
ccagactcgcgatanctgnntnanctaacantagcattntgangangtacctgngacttncacatagcagcggtgggtcgaacag

SEQ ID NO: 594 - DNA, 207 bp, Unknown Organism
  polynucleotide sequence showing no homology to known genes
  misc_feature (23)..(23): n is a, c, g, or t
  misc_feature (91)..(91): n is a, c, g, or t
  misc_feature (104)..(104): n is a, c, g, or t
  misc_feature (154)..(154): n is a, c, g, or t
  misc_feature (175)..(175): n is a, c, g, or t
atctattggatttatgctttggnttctgcttctaaaatatagaaattctggagaattgaagctcgtttctattcgaggttgcaattccagntcgaaatcatggnccatagctcgctcgaggattgctttttctttggagattattttgcactgnacccgttgaaaaattttcagnaacaaaggtccatcttccccattgcaacttca

SEQ ID NO: 595 - DNA, 274 bp, Unknown Organism
  polynucleotide sequence showing no homology to known genes
  misc_feature (4)..(4): n is a, c, g, or t
  misc_feature (17)..(17): n is a, c, g, or t
  misc_feature (21)..(21): n is a, c, g, or t
  misc_feature (37)..(37): n is a, c, g, or t
  misc_feature (59)..(59): n is a, c, g, or t
  misc_feature (90)..(90): n is a, c, g, or t
  misc_feature (165)..(165): n is a, c, g, or t
  misc_feature (188)..(189): n is a, c, g, or t
  misc_feature (207)..(207): n is a, c, g, or t
  misc_feature (252)..(252): n is a, c, g, or t
  misc_feature (255)..(255): n is a, c, g, or t
agancctatgataacangatnggaggactcatggctnaggcttggctggaaacatcggngctggggcccaccactctgaaccatatcgtntaggacggtctcctactagctggcctccacctctagcggtctggcctccacatataacgacctgacctatacctntagcgggatgacccctacctcgnnctcccagacccctacctntaaatggcttggcaggcaatgccagaatcatggcacggtgaactntgntactgcgactgaacaccca

SEQ ID NO: 596 - DNA, 89 bp, Unknown Organism
  polynucleotide sequence showing no homology to known genes
  misc_feature (3)..(3): n is a, c, g, or t
  misc_feature (28)..(28): n is a, c, g, or t
  misc_feature (33)..(33): n is a, c, g, or t
  misc_feature (37)..(37): n is a, c, g, or t
  misc_feature (43)..(43): n is a, c, g, or t
  misc_feature (52)..(52): n is a, c, g, or t
  misc_feature (74)..(74): n is a, c, g, or t
  misc_feature (76)..(77): n is a, c, g, or t
  misc_feature (80)..(80): n is a, c, g, or t
tcncagcatcgcaagtgatttactttgnctggngccnccaagntggaaggangttagccctgtaatcaaggcgntnntgnccttgcctc

SEQ ID NO: 597 - DNA, 126 bp, Unknown Organism
  polynucleotide sequence showing no homology to known genes
  misc_feature (2)..(2): n is a, c, g, or t
  misc_feature (5)..(5): n is a, c, g, or t
  misc_feature (11)..(11): n is a, c, g, or t
  misc_feature (17)..(17): n is a, c, g, or t
  misc_feature (24)..(24): n is a, c, g, or t
  misc_feature (64)..(65): n is a, c, g, or t
  misc_feature (71)..(71): n is a, c, g, or t
  misc_feature (122)..(122): n is a, c, g, or t
cncancaaccnttgtanatatgcnctttttacgctcgaaattttttagctgattgaagagggtnntctccntcttggcaggtataaggggaaagaagctgcttattgtagcagcaagttagngatc

SEQ ID NO: 598 - DNA, 145 bp, Unknown Organism
  polynucleotide sequence showing no homology to known genes
  misc_feature (29)..(29): n is a, c, g, or t
gagaccgttggccgcataaacagctccanctgaaaaggggagtaattgttttttttcttcttcttctgaaatatatatagacaaaagaaagaaaaataggaatgagaaaagggggaaaagcatgtgttcctagctattagtttcc

SEQ ID NO: 599 - DNA, 84 bp, Unknown Organism
  polynucleotide sequence showing no homology to known genes
cttgccggtccatttgcaggttgaagtggcagcttctggatcatgaaacgattgagtgcagcgtctgccagcatccattccttg

SEQ ID NO: 600 - DNA, 126 bp, Unknown Organism
  polynucleotide sequence showing no homology to known genes
  misc_feature (2)..(2): n is a, c, g, or t
  misc_feature (11)..(11): n is a, c, g, or t
  misc_feature (19)..(19): n is a, c, g, or t
  misc_feature (24)..(24): n is a, c, g, or t
  misc_feature (34)..(34): n is a, c, g, or t
  misc_feature (40)..(40): n is a, c, g, or t
  misc_feature (52)..(52): n is a, c, g, or t
  misc_feature (55)..(55): n is a, c, g, or t
  misc_feature (58)..(58): n is a, c, g, or t
  misc_feature (61)..(61): n is a, c, g, or t
  misc_feature (87)..(87): n is a, c, g, or t
  misc_feature (97)..(98): n is a, c, g, or t
  misc_feature (102)..(102): n is a, c, g, or t
  misc_feature (108)..(108): n is a, c, g, or t
  misc_feature (120)..(120): n is a, c, g, or t
cnccacgtctntgtgccgnagccnccccctcgcnccaatncgggtgtcattncancgncancgatttttacctacaagataggtggntcggatcganncgcnacattngatcagatttgncggtgc

SEQ ID NO: 601 - DNA, 137 bp, Unknown Organism
  polynucleotide sequence showing no homology to known genes
  misc_feature (2)..(2): n is a, c, g, or t
  misc_feature (4)..(4): n is a, c, g, or t
  misc_feature (6)..(6): n is a, c, g, or t
  misc_feature (10)..(11): n is a, c, g, or t
  misc_feature (18)..(18): n is a, c, g, or t
  misc_feature (23)..(23): n is a, c, g, or t
  misc_feature (31)..(31): n is a, c, g, or t
  misc_feature (59)..(59): n is a, c, g, or t
  misc_feature (64)..(66): n is a, c, g, or t
  misc_feature (68)..(68): n is a, c, g, or t
  misc_feature (73)..(73): n is a, c, g, or t
  misc_feature (97)..(97): n is a, c, g, or t
  misc_feature (100)..(100): n is a, c, g, or t
tncngncccnnttttgcncaaanccttgaanctccaaccactaccaccccaaaataccnacatnnntngattnagctcttcaagacctagctattgntgncaattctaccccaaaaatccggcgaccaaaatctggc

SEQ ID NO: 602 - DNA, 29 bp, Unknown Organism
  polynucleotide sequence showing no homology to known genes
  misc_feature (3)..(5): n is a, c, g, or t
  misc_feature (26)..(26): n is a, c, g, or t
tcnnnaacacaccctaaccttcaacnccc

SEQ ID NO: 603 - DNA, 129 bp, Unknown Organism
  polynucleotide sequence showing no homology to known genes
  misc_feature (1)..(1): n is a, c, g, or t
  misc_feature (66)..(66): n is a, c, g, or t
ncaacagctctaactgaaaaggggagtaattgttttttttcttcttcttctgaaatatatataganaaaagaaagaaaaataggaatgagaaaagggggaaaagcatgtgttcctagctattagtttcc

SEQ ID NO: 604 - DNA, 253 bp, Unknown Organism
  polynucleotide sequence showing no homology to known genes
  misc_feature (1)..(1): n is a, c, g, or t
  misc_feature (16)..(16): n is a, c, g, or t
  misc_feature (74)..(74): n is a, c, g, or t
  misc_feature (234)..(234): n is a, c, g, or t
nagcccggagcttttnaattctttcataacccaaggagaagaataggactctttaccagtatcataacctctcnatgggaaatggaacttagatcacgatgtgaacctacttatgagtggaatttcgttgacaagcaaattccccgggaaaacaaacttttctccaattgagatgctctcttcatttatggattctatgcgagattcggttagtgcgaagtgtgatcctggctnagaaggaaaagctatatgc

SEQ ID NO: 605 - DNA, 23 bp, Unknown Organism
  polynucleotide sequence showing no homology to known genes
  misc_feature (3)..(3): n is a, c, g, or t
  misc_feature (14)..(14): n is a, c, g, or t
  misc_feature (16)..(16): n is a, c, g, or t
ggnccaaaatcggnancatctcc

SEQ ID NO: 606 - DNA, 112 bp, Unknown Organism
  polynucleotide sequence showing no homology to known genes
  misc_feature (2)..(2): n is a, c, g, or t
  misc_feature (23)..(23): n is a, c, g, or t
  misc_feature (44)..(44): n is a, c, g, or t
  misc_feature (49)..(49): n is a, c, g, or t
  misc_feature (84)..(84): n is a, c, g, or t
tncccagcattccgcgctaccanagaaaaagatggatccaccanagatnaaacaagttatattgggtataggcatatgacgaanaccagagagacaagggcagttctatgat

SEQ ID NO: 607 - DNA, 209 bp, Unknown Organism
  polynucleotide sequence showing no homology to known genes
  misc_feature (11)..(11): n is a, c, g, or t
  misc_feature (18)..(18): n is a, c, g, or t
  misc_feature (22)..(22): n is a, c, g, or t
  misc_feature (30)..(30): n is a, c, g, or t
  misc_feature (38)..(38): n is a, c, g, or t
  misc_feature (45)..(45): n is a, c, g, or t
  misc_feature (64)..(65): n is a, c, g, or t
  misc_feature (87)..(87): n is a, c, g, or t
  misc_feature (93)..(93): n is a, c, g, or t
  misc_feature (97)..(97): n is a, c, g, or t
  misc_feature (107)..(107): n is a, c, g, or t
  misc_feature (130)..(130): n is a, c, g, or t
  misc_feature (137)..(137): n is a, c, g, or t
  misc_feature (149)..(149): n is a, c, g, or t
  misc_feature (154)..(154): n is a, c, g, or t
  misc_feature (156)..(156): n is a, c, g, or t
  misc_feature (159)..(159): n is a, c, g, or t
  misc_feature (162)..(162): n is a, c, g, or t
  misc_feature (206)..(207): n is a, c, g, or t
gacccttcccncaccgtntcgnatcttcgnttgaagantcgagcnggaccccaacctatgtcanncccccccaaatccataccaggnatccanctgncctcccttgngaccaaaccaagcttggctttgnccgaatntaaccagaaaancccangnccnaantcaggtccaagaaccctagaaatccggaatctgagggttttgtnnga

SEQ ID NO: 608 - DNA, 195 bp, Unknown Organism
  polynucleotide sequence showing no homology to known genes
  misc_feature (24)..(24): n is a, c, g, or t
tgctgttttcaggtctgctgattntgtgacgacgttagaaatctagtctcaatcccactgtatgtagtgtagagtaaacagttttgttgggcagctcaagagctgctgcaggtatttgatgttagttccacgggctctccaaaatcttgaaggccagatttgaagaaatatcctaaaaatatgtcttcttattcg

SEQ ID NO: 609 - DNA, 87 bp, Unknown Organism
  polynucleotide sequence showing no homology to known genes
  misc_feature (2)..(2): n is a, c, g, or t
  misc_feature (5)..(5): n is a, c, g, or t
  misc_feature (10)..(11): n is a, c, g, or t
  misc_feature (19)..(20): n is a, c, g, or t
  misc_feature (22)..(22): n is a, c, g, or t
  misc_feature (46)..(46): n is a, c, g, or t
  misc_feature (51)..(51): n is a, c, g, or t
  misc_feature (73)..(73): n is a, c, g, or t
  misc_feature (80)..(80): n is a, c, g, or t
  misc_feature (83)..(83): n is a, c, g, or t
gnagnggcgnncagcatcnntngatctgaaagggaacatgattgtntggtnaaactcgtaacggtaattaatnaccttgntangtcc

SEQ ID NO: 610 - DNA, 95 bp, Unknown Organism
  polynucleotide sequence showing no homology to known genes
  misc_feature (27)..(27): n is a, c, g, or t
  misc_feature (60)..(60): n is a, c, g, or t
  misc_feature (95)..(95): n is a, c, g, or t
ggggtcgggtttccggcgagtcaaggngtaatcttgttgttctgacaacgagtcgatgtngaaagtcacgtaactcaataccaaaggaaagggcn

SEQ ID NO: 611 - DNA, 174 bp, Unknown Organism
  polynucleotide sequence showing no homology to known genes
  misc_feature (45)..(45): n is a, c, g, or t
  misc_feature (95)..(95): n is a, c, g, or t
ccccggacgtttgaatctgggccaggtccttctggtaccaaatanggctagatttatttactttttcctaaaatgtaataaggccaaatgccagnactgacttattttttatcatcttagtgtcgtttggggattcgtctatttttatattatgaaatgaagcatttattggca

SEQ ID NO: 612 - DNA, 280 bp, Unknown Organism
  polynucleotide sequence showing no homology to known genes
  misc_feature (5)..(5): n is a, c, g, or t
  misc_feature (12)..(12): n is a, c, g, or t
  misc_feature (41)..(41): n is a, c, g, or t
  misc_feature (53)..(53): n is a, c, g, or t
  misc_feature (67)..(68): n is a, c, g, or t
  misc_feature (70)..(70): n is a, c, g, or t
  misc_feature (93)..(93): n is a, c, g, or t
  misc_feature (100)..(100): n is a, c, g, or t
  misc_feature (113)..(113): n is a, c, g, or t
  misc_feature (140)..(140): n is a, c, g, or t
ccccncagcttngaacataaccccccgagcatgactgcttntgatttacttancttatgcagttttnnanacgttcccacaagaacacgttcntcgttgncaaacagagattngaaggtttgtcatgattctgttactgnagatgagaatgctcatgagggcgggctccctaaggaaactgaagtgcattcccaagacatctctgtggatgcgaaaagcctcaattctgagaaattgaaagcgccatccatggaggaagaatcatgtcttacttatgcca

SEQ ID NO: 613 - DNA, 417 bp, Unknown Organism
  polynucleotide sequence showing no homology to known genes
  misc_feature (1)..(1): n is a, c, g, or t
  misc_feature (8)..(8): n is a, c, g, or t
  misc_feature (14)..(14): n is a, c, g, or t
  misc_feature (22)..(23): n is a, c, g, or t
  misc_feature (29)..(29): n is a, c, g, or t
  misc_feature (43)..(44): n is a, c, g, or t
  misc_feature (55)..(55): n is a, c, g, or t
  misc_feature (57)..(57): n is a, c, g, or t
  misc_feature (61)..(61): n is a, c, g, or t
  misc_feature (63)..(63): n is a, c, g, or t
  misc_feature (68)..(68): n is a, c, g, or t
  misc_feature (70)..(70): n is a, c, g, or t
  misc_feature (79)..(79): n is a, c, g, or t
  misc_feature (83)..(83): n is a, c, g, or t
  misc_feature (87)..(88): n is a, c, g, or t
  misc_feature (96)..(96): n is a, c, g, or t
  misc_feature (108)..(108): n is a, c, g, or t
  misc_feature (115)..(115): n is a, c, g, or t
  misc_feature (136)..(136): n is a, c, g, or t
  misc_feature (138)..(138): n is a, c, g, or t
  misc_feature (143)..(143): n is a, c, g, or t
  misc_feature (145)..(145): n is a, c, g, or t
  misc_feature (175)..(175): n is a, c, g, or t
  misc_feature (233)..(233): n is a, c, g, or t
  misc_feature (245)..(245): n is a, c, g, or t
  misc_feature (248)..(248): n is a, c, g, or t
  misc_feature (255)..(255): n is a, c, g, or t
  misc_feature (267)..(267): n is a, c, g, or t
  misc_feature (269)..(269): n is a, c, g, or t
  misc_feature (291)..(291): n is a, c, g, or t
  misc_feature (309)..(309): n is a, c, g, or t
ngcctacnggcacntcggcttnntacttntgtggatggctccnngctagccagtntnaganantaacngntgcatccgngacntatnnatgaattnccattgttgtcngatggtnggtcagggcataacctgttangntgganancatgatgtgctgtggatacacaaagaatgnaggcagacattcacagagtgctttctccaatagcacaagaaaaggaaccatcggtttntacacccagagnggnaaccccnattgtttccaancnaagcagtaaattcatgggaagnccttcttcacaagcaggntcatggaggcccaagcatccaacagttgttgcaataaagaagcaaattgtgtggagtcctctgaagatgaaggccatgagaagtaggcaataggaagcccctctcttc

SEQ ID NO: 614 - DNA, 91 bp, Unknown Organism
  polynucleotide sequence showing no homology to known genes
  misc_feature (25)..(25): n is a, c, g, or t
  misc_feature (31)..(31): n is a, c, g, or t
  misc_feature (44)..(45): n is a, c, g, or t
  misc_feature (47)..(48): n is a, c, g, or t
  misc_feature (52)..(52): n is a, c, g, or t
  misc_feature (56)..(56): n is a, c, g, or t
  misc_feature (67)..(68): n is a, c, g, or t
  misc_feature (71)..(71): n is a, c, g, or t
  misc_feature (78)..(78): n is a, c, g, or t
  misc_feature (80)..(80): n is a, c, g, or t
  misc_feature (90)..(90): n is a, c, g, or t
acaacggctaggttccgcgagtcancctggnaaaggagcctggnnanngtanagangaccgacagtnncgnatacagncncgagaacgtna

SEQ ID NO: 615 - DNA, 106 bp, Unknown Organism
  polynucleotide sequence showing no homology to known genes
  misc_feature (52)..(52): n is a, c, g, or t
ccaataggctcaaaacgcaacaaaaaccaaaagaagaacgaaattcccttgnttggattcataatctcaattgtcttgttttgtctggtacgtgaaaatgttgata

SEQ ID NO: 616 - DNA, 169 bp, Unknown Organism
  polynucleotide sequence showing no homology to known genes
  misc_feature (15)..(15): n is a, c, g, or t
  misc_feature (22)..(22): n is a, c, g, or t
  misc_feature (34)..(34): n is a, c, g, or t
  misc_feature (42)..(42): n is a, c, g, or t
  misc_feature (66)..(67): n is a, c, g, or t
  misc_feature (72)..(72): n is a, c, g, or t
  misc_feature (78)..(78): n is a, c, g, or t
  misc_feature (80)..(80): n is a, c, g, or t
  misc_feature (100)..(100): n is a, c, g, or t
  misc_feature (108)..(108): n is a, c, g, or t
  misc_feature (115)..(115): n is a, c, g, or t
ggaagtagctgcctncttgtgntgaaggcttgcngctgtctnccttcatttgttagcctagtaaanntggcntatatntncgatggccgctctcatgtgntaagcacntttgctnaaccatttctatgatagcatgagaatgatgatgctatgagttacaatgctggga

SEQ ID NO: 617 - DNA, 179 bp, Unknown Organism
  polynucleotide sequence showing no homology to known genes
  misc_feature (1)..(1): n is a, c, g, or t
  misc_feature (14)..(14): n is a, c, g, or t
nggaggggtccggnagatgaatctgggaaaggtccttctggtaccaaataggctagatttatttactttttcctaaaatgtaataaggccaaatgccagtactgacttattttttatcatcttagtgtcgtttggggattcgtctatttttatattatgaaatgaagcatttattggca

SEQ ID NO: 618 - DNA, 51 bp, Unknown Organism
  polynucleotide sequence showing no homology to known genes
caaggttttggtctttcttttttggagattggttgtgctatcttagctcca

SEQ ID NO: 619 - DNA, 94 bp, Unknown Organism
  polynucleotide sequence showing no homology to known genes
  misc_feature (8)..(8): n is a, c, g, or t
  misc_feature (25)..(25): n is a, c, g, or t
  misc_feature (33)..(33): n is a, c, g, or t
  misc_feature (39)..(39): n is a, c, g, or t
  misc_feature (47)..(47): n is a, c, g, or t
  misc_feature (52)..(52): n is a, c, g, or t
  misc_feature (57)..(58): n is a, c, g, or t
  misc_feature (63)..(63): n is a, c, g, or t
  misc_feature (79)..(79): n is a, c, g, or t
  misc_feature (82)..(82): n is a, c, g, or t
tacccacnccacctcccgctgctgntcctttgncttcanctcattcnaagcntgacnncactnccaatgtgtaaagctnagnggcgtactcgct

SEQ ID NO: 620 - DNA, 226 bp, Unknown Organism
  polynucleotide sequence showing no homology to known genes
  misc_feature (2)..(2): n is a, c, g, or t
  misc_feature (44)..(44): n is a, c, g, or t
  misc_feature (99)..(99): n is a, c, g, or t
  misc_feature (215)..(215): n is a, c, g, or t
tngttgcttcttctccacgccttctccggcactacttcttcttntccggtcgaaaattcggcagatccctctcattttctggctgggccgttcatcttnctcagcacaccacaaacaatcgatcttctcgacctctcaaccataaagccaccatcgaatccctctcatccgtttactcgaacatactagttacagaactaaataaactttcaaantttttgctgtt

SEQ ID NO: 621 - DNA, 478 bp, Unknown Organism
  polynucleotide sequence showing no homology to known genes
  misc_feature (20)..(20): n is a, c, g, or t
  misc_feature (30)..(30): n is a, c, g, or t
  misc_feature (42)..(42): n is a, c, g, or t
  misc_feature (45)..(46): n is a, c, g, or t
  misc_feature (61)..(63): n is a, c, g, or t
  misc_feature (68)..(69): n is a, c, g, or t
  misc_feature (71)..(71): n is a, c, g, or t
  misc_feature (83)..(83): n is a, c, g, or t
  misc_feature (91)..(92): n is a, c, g, or t
  misc_feature (99)..(99): n is a, c, g, or t
  misc_feature (127)..(127): n is a, c, g, or t
  misc_feature (133)..(133): n is a, c, g, or t
  misc_feature (136)..(136): n is a, c, g, or t
  misc_feature (330)..(330): n is a, c, g, or t
  misc_feature (337)..(337): n is a, c, g, or t
  misc_feature (352)..(352): n is a, c, g, or t
  misc_feature (354)..(354): n is a, c, g, or t
  misc_feature (361)..(362): n is a, c, g, or t
  misc_feature (370)..(370): n is a, c, g, or t
  misc_feature (372)..(373): n is a, c, g, or t
  misc_feature (381)..(381): n is a, c, g, or t
  misc_feature (384)..(384): n is a, c, g, or t
  misc_feature (401)..(401): n is a, c, g, or t
  misc_feature (406)..(406): n is a, c, g, or t
  misc_feature (423)..(423): n is a, c, g, or t
  misc_feature (429)..(429): n is a, c, g, or t
  misc_feature (447)..(447): n is a, c, g, or t
  misc_feature (453)..(453): n is a, c, g, or t
  misc_feature (457)..(457): n is a, c, g, or t
  misc_feature (465)..(465): n is a, c, g, or t
  misc_feature (473)..(473): n is a, c, g, or t
gcactacaagaagctgctgnggcttcttgnagggttttgtgngannataccactcttgatnnntgttnncnccgatggttatnggtttcannggaagcntcttcaagtcttacaaatcttatgaggnagcaanagnagtattcaatgacttccaaaaagaaaatatttacagtgaagaacaatcttcaagtttgtgtattgatgaaagtgatattggagcaagtgttatgtcatctgtattgttagctggaatgtttgtagggatgaagatttcaaaaagttcttcagtttgattgttgataagagtattttgctcaattttttattatngcttagnttgggtattattagntngattgtnnagtttgangnnatactggntgncgcattcaacctctgtngaatngagtatttaggatgccnaagccnttatctttttgactcccngttggnatgnaataaaanatgtctgntgatt

SEQ ID NO: 622 - DNA, 149 bp, Unknown Organism
  polynucleotide sequence showing no homology to known genes
  misc_feature (2)..(2): n is a, c, g, or t
  misc_feature (7)..(8): n is a, c, g, or t
  misc_feature (16)..(16): n is a, c, g, or t
  misc_feature (33)..(33): n is a, c, g, or t
  misc_feature (52)..(52): n is a, c, g, or t
  misc_feature (55)..(55): n is a, c, g, or t
  misc_feature (70)..(70): n is a, c, g, or t
  misc_feature (81)..(81): n is a, c, g, or t
  misc_feature (100)..(100): n is a, c, g, or t
  misc_feature (105)..(106): n is a, c, g, or t
  misc_feature (132)..(132): n is a, c, g, or t
  misc_feature (143)..(143): n is a, c, g, or t
antacanntaaaggtnttagctgctgacatttngaattgtcgctcaagctgntgnttggattgcttgtcnctgaaatttgnatttttgagtgttcgagtncgatnncaatttcagaaagtgaagctacattntgttgaatctnctattg

SEQ ID NO: 623 - DNA, 116 bp, Unknown Organism
  polynucleotide sequence showing no homology to known genes
ctaggcgtgttagtcgacaaagcatagcccacgttctgtgtttttggatcgcagttcatcgtcaaattctaggcgtagttctagtggtactagttcgaagcatccgtacagtagct

SEQ ID NO: 624 - DNA, 119 bp, Unknown Organism
  polynucleotide sequence showing no homology to known genes
agaaccaatccccaaatttttggggtacccactccacctcccgctgctgctcctttgccttcaactcatttcaagcatgacaacacttccaatgtgtaaagcttcgaggcatactcgct

SEQ ID NO: 625 - DNA, 95 bp, Unknown Organism
  polynucleotide sequence showing no homology to known genes
  misc_feature (9)..(9): n is a, c, g, or t
  misc_feature (15)..(15): n is a, c, g, or t
  misc_feature (18)..(18): n is a, c, g, or t
  misc_feature (21)..(21): n is a, c, g, or t
  misc_feature (24)..(24): n is a, c, g, or t
  misc_feature (37)..(37): n is a, c, g, or t
  misc_feature (41)..(41): n is a, c, g, or t
  misc_feature (70)..(70): n is a, c, g, or t
  misc_feature (84)..(84): n is a, c, g, or t
caattagcntgtgcnagncanaanagggaagagaagnaatntttgtatagcttcttgacaaatgtaggtnttagtgatccttgntatttacttat

SEQ ID NO: 626 - DNA, 129 bp, Unknown Organism
  polynucleotide sequence showing no homology to known genes
ttgtaatgctttgttatccaccactggtgtcgaacaatgttcagtgttttcttctaatggttagttcaagttgttgtggataaatgattatactgtgctcttcgtaaacataggatgcatttgtaccat

SEQ ID NO: 627 - DNA, 81 bp, Unknown Organism
  polynucleotide sequence showing no homology to known genes
  misc_feature (4)..(4): n is a, c, g, or t
  misc_feature (42)..(43): n is a, c, g, or t
  misc_feature (45)..(45): n is a, c, g, or t
  misc_feature (58)..(58): n is a, c, g, or t
  misc_feature (66)..(66): n is a, c, g, or t
  misc_feature (74)..(74): n is a, c, g, or t
  misc_feature (78)..(79): n is a, c, g, or t
tggntgatatcattatagatatagggcttcactccctaatcnntntttttccaaggtntacacaancctgattnttcnnct

SEQ ID NO: 628 - DNA, 239 bp, Unknown Organism
  polynucleotide sequence showing no homology to known genes
aggttgatgaagaaaatgaaagactaatagttgatgaagtatgtgaagcaatgaacaagatcaatgtttacaaccgatcatgagtttgaaggagtagaagaagagtgtgctgaatttgcatttgcctaaaggaaaccacttgcgtttccccgaagataactgaatgaaaaactttgttttttttccgctttctgtgaagacaccaatagctgaggtgttttagaaagtattacattctg

SEQ ID NO: 629 - DNA, 78 bp, Unknown Organism
  polynucleotide sequence showing no homology to known genes
  misc_feature (1)..(1): n is a, c, g, or t
  misc_feature (5)..(5): n is a, c, g, or t
  misc_feature (7)..(7): n is a, c, g, or t
  misc_feature (13)..(14): n is a, c, g, or t
  misc_feature (29)..(29): n is a, c, g, or t
  misc_feature (45)..(47): n is a, c, g, or t
  misc_feature (50)..(51): n is a, c, g, or t
  misc_feature (59)..(61): n is a, c, g, or t
  misc_feature (72)..(72): n is a, c, g, or t
  misc_feature (74)..(74): n is a, c, g, or t
  misc_feature (76)..(76): n is a, c, g, or t
nttcnancgaacnntccatgtgctcattncatgcaatgctgatgnnnaanngtgtccannnggccgtttacncntngg

SEQ ID NO: 630 - DNA, 192 bp, Unknown Organism
  polynucleotide sequence showing no homology to known genes
  misc_feature (6)..(6): n is a, c, g, or t
  misc_feature (15)..(15): n is a, c, g, or t
  misc_feature (36)..(36): n is a, c, g, or t
  misc_feature (58)..(58): n is a, c, g, or t
  misc_feature (64)..(64): n is a, c, g, or t
  misc_feature (68)..(68): n is a, c, g, or t
  misc_feature (79)..(79): n is a, c, g, or t
  misc_feature (93)..(93): n is a, c, g, or t
  misc_feature (103)..(103): n is a, c, g, or t
  misc_feature (107)..(107): n is a, c, g, or t
  misc_feature (115)..(115): n is a, c, g, or t
  misc_feature (138)..(138): n is a, c, g, or t
  misc_feature (178)..(178): n is a, c, g, or t
  misc_feature (186)..(186): n is a, c, g, or t
tgaccnaggaccaanattgaaggaacatcaacaaangacttgttactatgaatctttngcttgncgantagagcttatntattcttatgatgntgatgatgangctntaggcatnaaacttcatactaatatctttgnaattgcatctggatgttcaacttctaagagttgtgatggnctttagantttgag

SEQ ID NO: 631 - DNA, 316 bp, Unknown Organism
  polynucleotide sequence showing no homology to known genes
  misc_feature (12)..(12): n is a, c, g, or t
  misc_feature (20)..(21): n is a, c, g, or t
  misc_feature (75)..(75): n is a, c, g, or t
tttcttcaagantgccaaannaagcatgcaatgagcaacggttgtcacacgacatatagcactgtcaagttactnacaaaaagtgagaaaaagaaaaatgagagagtcttactagtgaaaacctccacgggcactgtaaggcgacggtaagcagagatgaataaatgagagagacttgttggtgaaaaccccttgggaactacttgtcgaaagtgagtcgtgaagctgatgcgaagaattggcataaacaagcctgacttcaaaggtcataagaatggtataaggggaagattggattagtttggtagatcggtcg

SEQ ID NO: 632 - DNA, 55 bp, Unknown Organism
  polynucleotide sequence showing no homology to known genes
  misc_feature (10)..(10): n is a, c, g, or t
  misc_feature (22)..(22): n is a, c, g, or t
  misc_feature (24)..(24): n is a, c, g, or t
  misc_feature (30)..(30): n is a, c, g, or t
  misc_feature (48)..(48): n is a, c, g, or t
  misc_feature (51)..(51): n is a, c, g, or t
gtgcaggagntggcccaaaagnangggagntgaatttactaattctgntgntggc

SEQ ID NO: 633 - DNA, 93 bp, Unknown Organism
  polynucleotide sequence showing no homology to known genes
  misc_feature (5)..(5): n is a, c, g, or t
  misc_feature (25)..(25): n is a, c, g, or t
  misc_feature (30)..(30): n is a, c, g, or t
  misc_feature (45)..(45): n is a, c, g, or t
  misc_feature (59)..(59): n is a, c, g, or t
  misc_feature (65)..(65): n is a, c, g, or t
  misc_feature (73)..(73): n is a, c, g, or t
  misc_feature (80)..(80): n is a, c, g, or t
  misc_feature (92)..(92): n is a, c, g, or t
ccacnccccctattttcccctatangcccnttctacattggcacntttcacaaacaagnacgctnaccctttnttatgtnggactctgtacnc

SEQ ID NO: 634 - DNA, 198 bp, Unknown Organism
  polynucleotide sequence showing no homology to known genes
  misc_feature (6)..(6): n is a, c, g, or t
  misc_feature (9)..(9): n is a, c, g, or t
  misc_feature (17)..(17): n is a, c, g, or t
  misc_feature (26)..(26): n is a, c, g, or t
  misc_feature (38)..(38): n is a, c, g, or t
  misc_feature (64)..(64): n is a, c, g, or t
  misc_feature (125)..(125): n is a, c, g, or t
  misc_feature (196)..(196): n is a, c, g, or t
gaggcnttncatttgancttcattgnaccaacaacttnaccaccatggcacactagttccttgncgacgggaagcaccatgaaaaacgctgtccctcaccactaaaagctcaccggaaaatagtngccggataagcttcagcacacccaggacccttctcgcatctccttcacaccagcgacccctcccccccggncg

SEQ ID NO: 635 - DNA, 338 bp, Unknown Organism
  polynucleotide sequence showing no homology to known genes
  misc_feature (1)..(3): n is a, c, g, or t
  misc_feature (7)..(7): n is a, c, g, or t
  misc_feature (16)..(16): n is a, c, g, or t
  misc_feature (19)..(20): n is a, c, g, or t
  misc_feature (43)..(43): n is a, c, g, or t
  misc_feature (52)..(52): n is a, c, g, or t
  misc_feature (56)..(56): n is a, c, g, or t
  misc_feature (82)..(82): n is a, c, g, or t
  misc_feature (118)..(118): n is a, c, g, or t
nnnacgntctcgagtntgnngcctttctcaagactgcccaaanaagcatgcnatgngcaacggttgtcacacgacatatagnactgtcaagttacttacaaaaagtgagaaaaggaanaatgagagagtcttactagtgaaaacctccacgggcactgtaaggcgacggtaagcagagatgaataaatgagagagacttgttggtgaaaaccccttgggaactacttgtcgaaagtgagtcgtgaagctgatgcgaagaattggcataaacaagcctgacttcaaaggtcataagaatggtataaggggaagattggattagtttggtagatcggtcg

SEQ ID NO: 636 - DNA, 96 bp, Unknown Organism
  polynucleotide sequence showing no homology to known genes
  misc_feature (9)..(9): n is a, c, g, or t
  misc_feature (14)..(14): n is a, c, g, or t
  misc_feature (24)..(24): n is a, c, g, or t
  misc_feature (26)..(26): n is a, c, g, or t
  misc_feature (32)..(32): n is a, c, g, or t
  misc_feature (41)..(41): n is a, c, g, or t
  misc_feature (46)..(46): n is a, c, g, or t
  misc_feature (64)..(64): n is a, c, g, or t
  misc_feature (67)..(67): n is a, c, g, or t
  misc_feature (77)..(77): n is a, c, g, or t
  misc_feature (82)..(82): n is a, c, g, or t
  misc_feature (89)..(89): n is a, c, g, or t
tccccaaantctgnttgaatgagngngcccanaccaggacngcttngccgctagacccggacanacntcttttcganaaacncatcgancagggca

SEQ ID NO: 637 - DNA, 125 bp, Unknown Organism
  polynucleotide sequence showing no homology to known genes
  misc_feature (29)..(29): n is a, c, g, or t
  misc_feature (44)..(44): n is a, c, g, or t
  misc_feature (50)..(51): n is a, c, g, or t
  misc_feature (67)..(67): n is a, c, g, or t
  misc_feature (72)..(72): n is a, c, g, or t
  misc_feature (78)..(79): n is a, c, g, or t
  misc_feature (84)..(84): n is a, c, g, or t
  misc_feature (89)..(89): n is a, c, g, or t
  misc_feature (96)..(96): n is a, c, g, or t
  misc_feature (120)..(120): n is a, c, g, or t
  misc_feature (123)..(123): n is a, c, g, or t
tttggaaatcgcccaagacaatttctggnatcggggaagtttgnagaatnnatgctattggcataantcagnagtttnnagatncgaanctgccantagactcgctaaagctggcgcctnacnta

SEQ ID NO: 638 - DNA, 121 bp, Unknown Organism
  polynucleotide sequence showing no homology to known genes
  misc_feature (24)..(24): n is a, c, g, or t
  misc_feature (30)..(30): n is a, c, g, or t
  misc_feature (105)..(105): n is a, c, g, or t
tgccctaaagccggggaaaatctnattggnggctgaaaatgaaccaaaaaagctgaagacaaaaggaatgatcaaagaaaaggttcgtaaattatattgatacanctctagacagtctcca

SEQ ID NO: 639 - DNA, 47 bp, Unknown Organism
  polynucleotide sequence showing no homology to known genes
tcaaaaggcaagcaacccctttggtgggcataagggtataaatgccg

SEQ ID NO: 640 - DNA, 67 bp, Unknown Organism
  polynucleotide sequence showing no homology to known genes
  misc_feature (1)..(1): n is a, c, g, or t
  misc_feature (29)..(29): n is a, c, g, or t
  misc_feature (50)..(50): n is a, c, g, or t
  misc_feature (57)..(58): n is a, c, g, or t
  misc_feature (65)..(65): n is a, c, g, or t
nctctacacagaaactcgaaacctacgcntgacggtcacgatttcagtanccttccnnctcctgngt

SEQ ID NO: 641 - DNA, 88 bp, Unknown Organism
  polynucleotide sequence showing no homology to known genes
  misc_feature (3)..(3): n is a, c, g, or t
  misc_feature (40)..(40): n is a, c, g, or t
  misc_feature (79)..(79): n is a, c, g, or t
tgnggtgggggagctcgtcacctgtctatcaggaccttgngtatactgcccaacctgaagctatgcaaatgtcacgacnccttagtct

SEQ ID NO: 642 - DNA, 160 bp, Unknown Organism
  polynucleotide sequence showing no homology to known genes
  misc_feature (9)..(9): n is a, c, g, or t
gatccctcnctcaaatgcattctgatcaactaaatttgaaaggcgagggcaatcgatgttatagaaaggggtttcgttggtgaattttctttgttcattttgcgcaacagcttgttgtcttgatagtgaaggagtttattttgtttacagaatattagtc

SEQ ID NO: 643 - DNA, 131 bp, Unknown Organism
  polynucleotide sequence showing no homology to known genes
cctacatcaccaaagctatcatctatgagctggtggaaggatggaagcactccatgtttcacactgattgaatcacccgtcctaccaaagcattgatgtcttcttctttatgatcacaggcaccctattac

SEQ ID NO: 644 - DNA, 155 bp, Unknown Organism
  polynucleotide sequence showing no homology to known genes
  misc_feature (8)..(8): n is a, c, g, or t
  misc_feature (11)..(11): n is a, c, g, or t
  misc_feature (16)..(17): n is a, c, g, or t
gaaggccnttncgttnnacaccaatgagcccttttcttctaaaaaacaaaaacacattcaaaaaccatccttagcagcagcaaaagacctctaaaaataagttcaaaccagctttttctttctccctaaatagtatgaaacccgtccaaataagc

SEQ ID NO: 645 - DNA, 169 bp, Unknown Organism
  polynucleotide sequence showing no homology to known genes
  misc_feature (53)..(53): n is a, c, g, or t
aatcttttcaccatcggccgcaataatcgcctctgcggcacgttcaatctggngtgggctcaagaacaacaagtatttggtctgcggatactgcgctgctgctagttcttcttcggtggtttcctcagaatctttcagcgccttgatgcgctttgcatccacttccgcc

SEQ ID NO: 646 - DNA, 163 bp, Unknown Organism
  polynucleotide sequence showing no homology to known genes
  misc_feature (25)..(25): n is a, c, g, or t
  misc_feature (82)..(82): n is a, c, g, or t
  misc_feature (113)..(113): n is a, c, g, or t
ggctcatatcgattatggatcaganattaccggagaagaaagatttttacctttttagacttatactagggatgaaactctnctactatataaagagaaaggttttcttttgnaacatatactggaacatgcaaatcaaagcaataggagtttattttctgcc

SEQ ID NO: 647 - DNA, 222 bp, Unknown Organism
  polynucleotide sequence showing no homology to known genes
  misc_feature (3)..(4): n is a, c, g, or t
  misc_feature (9)..(10): n is a, c, g, or t
  misc_feature (19)..(19): n is a, c, g, or t
  misc_feature (71)..(71): n is a, c, g, or t
  misc_feature (99)..(99): n is a, c, g, or t
  misc_feature (114)..(114): n is a, c, g, or t
  misc_feature (120)..(120): n is a, c, g, or t
  misc_feature (124)..(124): n is a, c, g, or t
  misc_feature (127)..(127): n is a, c, g, or t
  misc_feature (131)..(131): n is a, c, g, or t
  misc_feature (142)..(142): n is a, c, g, or t
  misc_feature (150)..(150): n is a, c, g, or t
  misc_feature (175)..(175): n is a, c, g, or t
  misc_feature (193)..(193): n is a, c, g, or t
  misc_feature (203)..(203): n is a, c, g, or t
  misc_feature (205)..(205): n is a, c, g, or t
  misc_feature (207)..(207): n is a, c, g, or t
  misc_feature (211)..(211): n is a, c, g, or t
  misc_feature (220)..(220): n is a, c, g, or t
gcnntggcnnatcccactntatgggcggtagccaggcgtataccgaggtcggacagatcacttagcgctgncgggggaaaagggctttgcataaccctngcaggactcgtttgntttacncgcntgnagtnaggacctttgntgcgaggnagcccgtaaagccgagcagcaaagncatattcctgagctggtnaaatatttcngncngacnggccacgtncc

SEQ ID NO: 648 - DNA, 289 bp, Unknown Organism
  polynucleotide sequence showing no homology to known genes
  misc_feature (3)..(3): n is a, c, g, or t
  misc_feature (68)..(68): n is a, c, g, or t
  misc_feature (109)..(109): n is a, c, g, or t
  misc_feature (112)..(112): n is a, c, g, or t
  misc_feature (160)..(160): n is a, c, g, or t
  misc_feature (179)..(179): n is a, c, g, or t
  misc_feature (189)..(189): n is a, c, g, or t
  misc_feature (195)..(195): n is a, c, g, or t
ccnggaacctattgactcgacctcaatcaaagaaaagggatggtgatttcgctccatttccaggctgnttcctggtgttcaaagggtacttttgagtggcgtttcaggnggncttttttagcaacgacacaactatttcgaacagaggtttcagctgcgnttcgaacagttttgagagngatttctggnggtttncggggctagaaggatgctggtagagttcttgtccgaggttttgacatttcagattcatcgaggtctatttcttccttcctcacgttgtttgtgc

SEQ ID NO: 649 - DNA, 129 bp, Unknown Organism
  polynucleotide sequence showing no homology to known genes
  misc_feature (2)..(2): n is a, c, g, or t
  misc_feature (32)..(32): n is a, c, g, or t
cncatcaccaaagctatcatctatgagctggnggaaggatggaagcactccatgtttcacactgattgaatcacccgtcctaccaaagcattgatgtcttcttctttatgatcacaggcaccctattac

SEQ ID NO: 650 - DNA, 144 bp, Unknown Organism
  polynucleotide sequence showing no homology to known genes
  misc_feature (12)..(12): n is a, c, g, or t
  misc_feature (18)..(18): n is a, c, g, or t
  misc_feature (89)..(89): n is a, c, g, or t
tcgtctacggangattgntcaggtacacgcttctgaaattatggattgatgtacgtttgaattggaagttgagttgaagtaaacaaagnaaatgaatcgttcacctactttcacaatacctgtgtttcaaatgtagcaatagga

SEQ ID NO: 651 - DNA, 165 bp, Unknown Organism
  polynucleotide sequence showing no homology to known genes
  misc_feature (7)..(8): n is a, c, g, or t
  misc_feature (22)..(23): n is a, c, g, or t
ctacggnnaactcctcatcttnncccttctactcctttgatgtccagagcaacattttccggtgccggaattgtgaaagggaggtcagcgcgagcagaatcaccagccattgtggcaatttggcatagtaaaaagacaatggaaaggaaggatgaaagttttcga

SEQ ID NO: 652 - DNA, 152 bp, Unknown Organism
  polynucleotide sequence showing no homology to known genes
  misc_feature (76)..(76): n is a, c, g, or t
  misc_feature (86)..(86): n is a, c, g, or t
  misc_feature (91)..(91): n is a, c, g, or t
  misc_feature (107)..(107): n is a, c, g, or t
cgaatgtcctgattgcactgaaatgaaatgaagaggaagcatatttttgttgaaatttccggtggcttcaatgctntcattatagntttgnaataattttggactgnattgaactgatgaactgttaggcttgagtttgatcatttggacta

SEQ ID NO: 653 - DNA, 106 bp, Unknown Organism
  polynucleotide sequence showing no homology to known genes
  misc_feature (22)..(22): n is a, c, g, or t
  misc_feature (77)..(77): n is a, c, g, or t
  misc_feature (81)..(81): n is a, c, g, or t
ctggtgtcgaacaatgttcagngttttcttctaatggttagttcaagttgttgtggataaatgattatactgtgctnttcntaaacataggatgcatttgtaccat

SEQ ID NO: 654 - DNA, 341 bp, Unknown Organism
  polynucleotide sequence showing no homology to known genes
  misc_feature (5)..(5): n is a, c, g, or t
ttctncggcagaagtcaagctatctatcaagtgcacttgaccatgataaggcgacaatcccggagggtaactctagaggaggtacatgctcgcggctttgatctctcagccgatattgaaaggacgaagattttggaagaagaggctgccactcagctttctgatgaggatgattcagccagtggctctaagagtggaggagacgaagatgaagtccccgagggtgaggctctcgaagatgcggctcctaaagatgaaactgctgaaaatatgaccccgaagtagttttgggtttccttattttgtttctgttcaagtctcccttatgtaaatatctccta

SEQ ID NO: 655 - DNA, 269 bp, Unknown Organism
  polynucleotide sequence showing no homology to known genes
  misc_feature (2)..(3): n is a, c, g, or t
gnntgctcttgatttttctgaaaaatcagaagaatcatcagtgtgttcctctgtggtgtcataccaaggaggtgaggctgaaagtaaagagaatgacgacaattcatctatatggtcaattcaagtgaatgcaagtactaaagatgatgaagaagatgaggaagaaggaggacttgaagaagaagaagaagaatatgatgatgataactatgatgaaaatgaagaagatggagatttagttgatgaactgtgtgaagcaattagcaaga

SEQ ID NO: 656 - DNA, 241 bp, Unknown Organism
  polynucleotide sequence showing no homology to known genes
  misc_feature (41)..(41): n is a, c, g, or t
  misc_feature (146)..(146): n is a, c, g, or t
atgaggtgttgggttacatctctatttccctttttgtaccntccacgtggacacttcttctcctttagttttgattctttgtctgcaatgcccctctttccaacctctcaaatgcctggacaacagataatctcgttcttgtttgntgcgacaaatgttgttcataagttgtgtttattataagatattgaacatcatagcttccacttagttctttagctaatgtgaaagttgcttatgg

SEQ ID NO: 657 - DNA, 249 bp, Unknown Organism
  polynucleotide sequence showing no homology to known genes
acgttgagagccgtaagccagaaactggagaggaagatacaaatgcatctgccggttcaactggagttgatagcatggctgatagcataaaatcattcacttgtaatcagaattttacagatactgaggcttgcacgtcagcaataggtctatcagctcatgatgatcaggcatcagatattgcagaccctgaagaagctgctgtgacagaatcagctgtagtaagtcaggaatgtgcctctaatttgg

SEQ ID NO: 658 - DNA, 227 bp, Unknown Organism
  polynucleotide sequence showing no homology to known genes
  misc_feature (36)..(36): n is a, c, g, or t
  misc_feature (174)..(174): n is a, c, g, or t
  misc_feature (182)..(182): n is a, c, g, or t
  misc_feature (199)..(199): n is a, c, g, or t
ggatgagagaaagccaagtcggacggtttggtgaanccagaactaattcagcagatcgttatagtggacagagaagctgattttgaaaatgctcttcagaatggtggggggaagatagctcctggtggtgtaatcagtgtaaaatccaacaaattcaagcttgagaagcatttngagccggngactgaaaagagtggcnagaaaaagaaacaaaaaaccattctgga

SEQ ID NO: 659 - DNA, 114 bp, Unknown Organism
  polynucleotide sequence showing no homology to known genes
  misc_feature (7)..(7): n is a, c, g, or t
  misc_feature (19)..(19): n is a, c, g, or t
  misc_feature (28)..(28): n is a, c, g, or t
  misc_feature (47)..(47): n is a, c, g, or t
agcctgncctaaaccagtnttcgatctntgctctgctgccatttgtngaaccattggcacagtggaactgaaaagaagaacgcgtccatgctgtccttgtccaatcactgtcca

SEQ ID NO: 660 - DNA, 129 bp, Unknown Organism
  polynucleotide sequence showing no homology to known genes
  misc_feature (14)..(14): n is a, c, g, or t
  misc_feature (22)..(22): n is a, c, g, or t
  misc_feature (45)..(45): n is a, c, g, or t
  misc_feature (49)..(49): n is a, c, g, or t
  misc_feature (55)..(55): n is a, c, g, or t
  misc_feature (58)..(58): n is a, c, g, or t
  misc_feature (69)..(69): n is a, c, g, or t
  misc_feature (77)..(77): n is a, c, g, or t
  misc_feature (86)..(86): n is a, c, g, or t
aaagcaactgtttnttagagtncatgggtttagccatggcccatncttnattagnccnaaacactcccnaagatatngatattggncacaacaaaggcccgtgcagaagatggtgtgccactcccacca

SEQ ID NO: 661 - DNA, 205 bp, Unknown Organism
  polynucleotide sequence showing no homology to known genes
  misc_feature (7)..(9): n is a, c, g, or t
  misc_feature (43)..(44): n is a, c, g, or t
  misc_feature (46)..(46): n is a, c, g, or t
  misc_feature (88)..(88): n is a, c, g, or t
  misc_feature (104)..(104): n is a, c, g, or t
  misc_feature (155)..(155): n is a, c, g, or t
  misc_feature (202)..(202): n is a, c, g, or t
acggggnnnttgtcccattgacgtatctcacaactattttaanngncaaacccgaagtggtatgtggtgtggtctgcaaatatgaacnctcacattcttcccgnggtgcgtagttagctacaaatatggacgtcatatgtcaggtcaagcaaatngtgcttcatccatgaagtgggctcctcatgcttcaaatgcaatgggnaca

SEQ ID NO: 662 - DNA, 54 bp, Unknown Organism
  polynucleotide sequence showing no homology to known genes
  misc_feature (25)..(25): n is a, c, g, or t
  misc_feature (33)..(33): n is a, c, g, or t
  misc_feature (40)..(40): n is a, c, g, or t
  misc_feature (45)..(46): n is a, c, g, or t
ttgagaaagttttgtttttaagacnggttgctnggaaagnatggnngttggcca

SEQ ID NO: 663 - DNA, 223 bp, Unknown Organism
  polynucleotide sequence showing no homology to known genes
  misc_feature (3)..(4): n is a, c, g, or t
  misc_feature (28)..(28): n is a, c, g, or t
  misc_feature (34)..(34): n is a, c, g, or t
  misc_feature (46)..(46): n is a, c, g, or t
  misc_feature (56)..(57): n is a, c, g, or t
  misc_feature (61)..(61): n is a, c, g, or t
  misc_feature (64)..(65): n is a, c, g, or t
  misc_feature (81)..(81): n is a, c, g, or t
  misc_feature (91)..(91): n is a, c, g, or t
  misc_feature (94)..(94): n is a, c, g, or t
  misc_feature (100)..(100): n is a, c, g, or t
  misc_feature (105)..(105): n is a, c, g, or t
  misc_feature (107)..(107): n is a, c, g, or t
  misc_feature (110)..(110): n is a, c, g, or t
  misc_feature (112)..(112): n is a, c, g, or t
  misc_feature (117)..(117): n is a, c, g, or t
  misc_feature (120)..(120): n is a, c, g, or t
  misc_feature (122)..(122): n is a, c, g, or t
  misc_feature (125)..(125): n is a, c, g, or t
  misc_feature (136)..(136): n is a, c, g, or t
  misc_feature (143)..(143): n is a, c, g, or t
  misc_feature (150)..(151): n is a, c, g, or t
  misc_feature (170)..(170): n is a, c, g, or t
  misc_feature (177)..(177): n is a, c, g, or t
  misc_feature (186)..(186): n is a, c, g, or t
  misc_feature (199)..(199): n is a, c, g, or t
  misc_feature (207)..(207): n is a, c, g, or t
  misc_feature (210)..(210): n is a, c, g, or t
  misc_feature (217)..(217): n is a, c, g, or t
ttnnaatagccatacaaggtatatcggnggttantgcatgtttttnaacttatggnncacncannattgttgttgatccanggtcacaaanagncaagcngtcangntgnangaganaantnaanaatggaggcanatgtggngatgtanntaccagttgtgaacaatangacatgnactgttcgncatgattggcacnatttgtgnggngaatccnaagcaa

SEQ ID NO: 664 - DNA, 207 bp, Unknown Organism
  polynucleotide sequence showing no homology to known genes
  misc_feature (3)..(3): n is a, c, g, or t
gangaccctatgctgatgatccctatgcgtttggctagaggtgaagatgtcccactccagtgcagagcttcctagagaatctgaaactttgacctggaaatgtgtgtgcgctgattctttgattgcagacgtatagctggctgctttccacattgcaaggaactagaattttacttcccccaaaaataaaactgtatataactgcaa

SEQ ID NO: 665 - DNA, 308 bp, Unknown Organism
  polynucleotide sequence showing no homology to known genes
  misc_feature (10)..(10): n is a, c, g, or t
  misc_feature (41)..(41): n is a, c, g, or t
  misc_feature (51)..(52): n is a, c, g, or t
  misc_feature (95)..(95): n is a, c, g, or t
  misc_feature (107)..(108): n is a, c, g, or t
  misc_feature (135)..(135): n is a, c, g, or t
  misc_feature (137)..(138): n is a, c, g, or t
  misc_feature (176)..(176): n is a, c, g, or t
  misc_feature (186)..(187): n is a, c, g, or t
  misc_feature (204)..(204): n is a, c, g, or t
ccctatgcgnttggctagaggtgaagaatgtcccactccanggcaaagctnnctagagaatctgaaactttgacctggaaatgtgtgtgcgctcnactttgattgcnntacgtatagctggctgctttccacatngnnaggaactagaattttacttcccccaaaaataaaactgnatataactgnnattactcaggactcatnatcctcctgctcaagttgctcaagttcctggagcagaagtgatccctgctccagctcctactggctgggaatgagacctgcttcctttagaaagttctttttga

SEQ ID NO: 666 - DNA, 206 bp, Unknown Organism
  polynucleotide sequence showing no homology to known genes
  misc_feature (3)..(4): n is a, c, g, or t
  misc_feature (6)..(6): n is a, c, g, or t
  misc_feature (11)..(11): n is a, c, g, or t
  misc_feature (18)..(18): n is a, c, g, or t
  misc_feature (35)..(35): n is a, c, g, or t
  misc_feature (64)..(64): n is a, c, g, or t
  misc_feature (73)..(73): n is a, c, g, or t
  misc_feature (83)..(83): n is a, c, g, or t
  misc_feature (87)..(87): n is a, c, g, or t
  misc_feature (97)..(97): n is a, c, g, or t
  misc_feature (102)..(102): n is a, c, g, or t
  misc_feature (117)..(118): n is a, c, g, or t
  misc_feature (120)..(121): n is a, c, g, or t
  misc_feature (131)..(131): n is a, c, g, or t
  misc_feature (147)..(147): n is a, c, g, or t
  misc_feature (155)..(155): n is a, c, g, or t
  misc_feature (158)..(158): n is a, c, g, or t
ganngncgtanacgaagncaggggactgaatcatnaagtatgcacaacggagctctatttgttngttccaccntgtgttgggngggnggagtggctncctantgatatgtatgtatnntnngagccaaagntcatattatacttaancctactgngcncctataaagagaatgccgcgagattcagaagatgcttctgatctgtga

SEQ ID NO: 667 - DNA, 218 bp, Unknown Organism
  polynucleotide sequence showing no homology to known genes
ggaggctaataagttgaaggcattgcagagagctgctgctcgaacctctcatatcaagtctacgtgatggttttcacatagagctccatagaggtttctaactaattatatcctttcttattgtaaatgcttcagattaccttcaatcttgaacgtccagagacttgtccaaatgataaatctttttactctttcacccaaattggatgtcattttca

SEQ ID NO: 668 - DNA, 222 bp, Unknown Organism
  polynucleotide sequence showing no homology to known genes
aatctgaagggtcagaagaatcatcagtgtgttcctctgtggtgacataccaaggaggtgaggctgaaagtaaagagaatgacgacaattcatctatgtggtcgattcaagtgaatgcaagtactaaagatgatgaagaagatgaggaagaaggaggacttgaagaagaagaagaagaatatggagatttagttgatgaactgtgtgaagcaattagcaaga

SEQ ID NO: 669 - DNA, 111 bp, Unknown Organism
  polynucleotide sequence showing no homology to known genes
  misc_feature (5)..(5): n is a, c, g, or t
  misc_feature (30)..(30): n is a, c, g, or t
gccancccagtcgacaagaccagcgcctgnacgtaaaaatctgatacctgactaagcttatgtcctgagggagccaacctccctcaggcgtctgttactacctgctggctt

SEQ ID NO: 670 - DNA, 167 bp, Unknown Organism
  polynucleotide sequence showing no homology to known genes
  misc_feature (11)..(11): n is a, c, g, or t
  misc_feature (36)..(36): n is a, c, g, or t
  misc_feature (58)..(58): n is a, c, g, or t
  misc_feature (65)..(65): n is a, c, g, or t
  misc_feature (86)..(86): n is a, c, g, or t
  misc_feature (89)..(89): n is a, c, g, or t
  misc_feature (112)..(112): n is a, c, g, or t
  misc_feature (124)..(124): n is a, c, g, or t
  misc_feature (128)..(130): n is a, c, g, or t
  misc_feature (133)..(133): n is a, c, g, or t
  misc_feature (138)..(138): n is a, c, g, or t
  misc_feature (140)..(140): n is a, c, g, or t
  misc_feature (151)..(151): n is a, c, g, or t
  misc_feature (161)..(161): n is a, c, g, or t
  misc_feature (163)..(163): n is a, c, g, or t
  misc_feature (165)..(165): n is a, c, g, or t
gccggctctgngtccacctgactatcagaagcggcncagatgattgcatctgtattanaaacaanggaatctccatcttccatgantgngcctatagacatctctctataantcattttttttncttnnncanaaatngncggagatactntagcttcatnantngt

SEQ ID NO: 671 - DNA, 131 bp, Unknown Organism
  polynucleotide sequence showing no homology to known genes
  misc_feature (24)..(24): n is a, c, g, or t
  misc_feature (26)..(26): n is a, c, g, or t
  misc_feature (50)..(52): n is a, c, g, or t
  misc_feature (61)..(61): n is a, c, g, or t
  misc_feature (85)..(85): n is a, c, g, or t
  misc_feature (89)..(89): n is a, c, g, or t
  misc_feature (124)..(124): n is a, c, g, or t
  misc_feature (129)..(129): n is a, c, g, or t
gggcaagtggatggtgggtactgncncgttcggagctcgaaggtttctgnnnctggattgnctgtctataccattatgtgatgtnaccnagatggcatcgcatcttgaggcccactctcatctngcttntg

SEQ ID NO: 672 - DNA, 146 bp, Unknown Organism
  polynucleotide sequence showing no homology to known genes
  misc_feature (3)..(3): n is a, c, g, or t
  misc_feature (6)..(6): n is a, c, g, or t
  misc_feature (13)..(13): n is a, c, g, or t
  misc_feature (16)..(16): n is a, c, g, or t
ggngcnattgccnaantgtgcttcttgctggatatcatgtgtgagtgttatcttcaagaacctcacaaatttgtagttgatcagaatctttgcaatgcgttttctcattttctttcatttgtgcttcctttattttgtcttttacg

SEQ ID NO: 673 - DNA, 155 bp, Unknown Organism
  polynucleotide sequence showing no homology to known genes
  misc_feature (25)..(25): n is a, c, g, or t
  misc_feature (30)..(32): n is a, c, g, or t
  misc_feature (36)..(36): n is a, c, g, or t
  misc_feature (50)..(51): n is a, c, g, or t
  misc_feature (53)..(55): n is a, c, g, or t
  misc_feature (57)..(57): n is a, c, g, or t
  misc_feature (67)..(67): n is a, c, g, or t
  misc_feature (95)..(95): n is a, c, g, or t
  misc_feature (106)..(106): n is a, c, g, or t
  misc_feature (114)..(114): n is a, c, g, or t
  misc_feature (124)..(124): n is a, c, g, or t
  misc_feature (155)..(155): n is a, c, g, or t
ggtgctgaattggaggaaggagaanaggannnggangaggaatgcctagnngnnngngtgcatagantccaactgagtcacgcaagaaaccagtntgttccactgnttggcttnctgctagggntgttgagtctttgaataagaacgttgatggn

SEQ ID NO: 674 - DNA, 248 bp, Unknown Organism
  polynucleotide sequence showing no homology to known genes
caccattcttgatcgtagtccgagattccacggtgagctgctcccttcctatgtcgttcagcagcatgatggagtctctctttgcttttggttgtctattctatttcagacagttggatagatttattcttttatatattctgctagatgcccatatacttgtgacaccaggtcttgacacacacattagtagactattcttttgggattgtataattattattgtacgttgctaattatcacttggt

SEQ ID NO: 675 - DNA, 292 bp, Unknown Organism
  polynucleotide sequence showing no homology to known genes
  misc_feature (6)..(7): n is a, c, g, or t
  misc_feature (9)..(9): n is a, c, g, or t
  misc_feature (12)..(12): n is a, c, g, or t
  misc_feature (28)..(29): n is a, c, g, or t
  misc_feature (33)..(33): n is a, c, g, or t
  misc_feature (49)..(49): n is a, c, g, or t
  misc_feature (56)..(56): n is a, c, g, or t
  misc_feature (62)..(62): n is a, c, g, or t
  misc_feature (73)..(73): n is a, c, g, or t
  misc_feature (79)..(79): n is a, c, g, or t
  misc_feature (83)..(83): n is a, c, g, or t
  misc_feature (100)..(100): n is a, c, g, or t
  misc_feature (109)..(109): n is a, c, g, or t
  misc_feature (113)..(113): n is a, c, g, or t
  misc_feature (139)..(140): n is a, c, g, or t
  misc_feature (146)..(146): n is a, c, g, or t
  misc_feature (148)..(148): n is a, c, g, or t
  misc_feature (154)..(155): n is a, c, g, or t
  misc_feature (159)..(159): n is a, c, g, or t
  misc_feature (171)..(171): n is a, c, g, or t
  misc_feature (176)..(177): n is a, c, g, or t
  misc_feature (180)..(182): n is a, c, g, or t
  misc_feature (200)..(200): n is a, c, g, or t
  misc_feature (259)..(259): n is a, c, g, or t
  misc_feature (264)..(264): n is a, c, g, or t
  misc_feature (270)..(270): n is a, c, g, or t
  misc_feature (286)..(286): n is a, c, g, or t
gggggnngnttntctctccgctggaaanntgantgacttgggtgctaantgatggnagaccnacacacccaanaagggnaagnggaaaggacgacatggntcaatagcncagngagggagacagacggaatgaaacganncaaganantggggnnaccntgttctatttantgtgnnagnnnaaacaacccacgttcctnacaaaacaaacagtattttggatcggagactaatctgaattttccagacgagttttttncggtnaatctngaggttccgacatggntttttg

SEQ ID NO: 676 - DNA, 44 bp, Unknown Organism
  polynucleotide sequence showing no homology to known genes
  misc_feature (8)..(8): n is a, c, g, or t
  misc_feature (10)..(10): n is a, c, g, or t
  misc_feature (13)..(13): n is a, c, g, or t
tagggaancnatnctcatttgttatgaccaccatttacttagct

SEQ ID NO: 677 - DNA, 119 bp, Unknown Organism
  polynucleotide sequence showing no homology to known genes
  misc_feature (4)..(4): n is a, c, g, or t
  misc_feature (6)..(6): n is a, c, g, or t
  misc_feature (9)..(9): n is a, c, g, or t
  misc_feature (33)..(33): n is a, c, g, or t
  misc_feature (74)..(75): n is a, c, g, or t
  misc_feature (91)..(91): n is a, c, g, or t
  misc_feature (95)..(95): n is a, c, g, or t
  misc_feature (102)..(102): n is a, c, g, or t
  misc_feature (112)..(112): n is a, c, g, or t
ctcngntancaacacggctggataaacttcagngctcccggtgtgggtctatttatcggagtttgagcacgacnnacaccccgggaccatntagntaggatngctcattcangaatagc

SEQ ID NO: 678 - DNA, 308 bp, Unknown Organism
  polynucleotide sequence showing no homology to known genes
tcagaatgcgaatttgcctactcaaatgaacgagattcctgctaagtggaatggcaatccggaaggttgtagttttgttcgtccaagctctttctcggcttcctcatcacctgcaggtccttttagatcatcatctttgtattattctgccggcttttcataaccaagaatgttgccttgcatgggcatttactctcatgacagacaatagaaacctgacgcttacaaagcataaatatagcagtctgaacgaaaacacacacggcaagtttgagcagatgagttattctagatttgcaggttttgct

SEQ ID NO: 679 - DNA, 69 bp, Unknown Organism
  polynucleotide sequence showing no homology to known genes
  misc_feature (18)..(18): n is a, c, g, or t
  misc_feature (30)..(30): n is a, c, g, or t
  misc_feature (41)..(41): n is a, c, g, or t
  misc_feature (67)..(67): n is a, c, g, or t
tttggccatacaaagggntgaatatgaggnatatggggggntaggcatatgtcgcacaaaccctggnat

SEQ ID NO: 680 - DNA, 73 bp, Unknown Organism
  polynucleotide sequence showing no homology to known genes
accctaccgggaggatcatatgagcgtgggttctactggcctcgacgtcctctgtagttggaagggaaaccat

SEQ ID NO: 681 - DNA, 17 bp, Unknown Organism
  polynucleotide sequence showing no homology to known genes
ggtgttttaggttgtct

SEQ ID NO: 682 - DNA, 67 bp, Unknown Organism
  polynucleotide sequence showing no homology to known genes
  misc_feature (2)..(2): n is a, c, g, or t
  misc_feature (8)..(8): n is a, c, g, or t
  misc_feature (24)..(24): n is a, c, g, or t
  misc_feature (28)..(28): n is a, c, g, or t
  misc_feature (32)..(32): n is a, c, g, or t
  misc_feature (40)..(40): n is a, c, g, or t
  misc_feature (42)..(42): n is a, c, g, or t
  misc_feature (45)..(45): n is a, c, g, or t
  misc_feature (58)..(58): n is a, c, g, or t
tngccccngccagtcggacagaancggntagnaccgaagncnatnctgccacgggcanggaagacgt

SEQ ID NO: 683 - DNA, 119 bp, Unknown Organism
  polynucleotide sequence showing no homology to known genes
agaggtggtgggactgttcgttcggtgctcgaggtttctggttctgatttctgtctataccattattgttgtaaccgagatggcatcgcatcttgaggtccactctcatcttgcttatg

SEQ ID NO: 684 - DNA, 261 bp, Unknown Organism
  polynucleotide sequence showing no homology to known genes
  misc_feature (3)..(3): n is a, c, g, or t
  misc_feature (5)..(5): n is a, c, g, or t
  misc_feature (7)..(8): n is a, c, g, or t
  misc_feature (14)..(14): n is a, c, g, or t
  misc_feature (26)..(26): n is a, c, g, or t
  misc_feature (28)..(28): n is a, c, g, or t
  misc_feature (32)..(32): n is a, c, g, or t
  misc_feature (43)..(43): n is a, c, g, or t
  misc_feature (46)..(46): n is a, c, g, or t
  misc_feature (61)..(61): n is a, c, g, or t
  misc_feature (69)..(69): n is a, c, g, or t
  misc_feature (115)..(115): n is a, c, g, or t
gcngngnncaaggnggctacctgacntnactnaataaatcaanctntttgaactcagggtntataggangagatggaggctcatgcatggttgacaccagggttactggaaaganggtttatcatccaaaccataacattgacactgaggatgatgcacttgcgctgaagttgtcatcaaccacaaccattgcttcagataatacgagctcattatctaatgaggaatcagcaaacttagcaagtgttacttcactttctg

SEQ ID NO: 685 - DNA, 100 bp, Unknown Organism
  polynucleotide sequence showing no homology to known genes
cgttacatattaggagtataattttttcattactaaagcatgtaaatatgttgctccgggctttggtctattagtaagagcgcaatgcgtgatatgtggg

SEQ ID NO: 686 - DNA, 97 bp, Unknown Organism
  polynucleotide sequence showing no homology to known genes
  misc_feature (3)..(3): n is a, c, g, or t
  misc_feature (12)..(16): n is a, c, g, or t
  misc_feature (27)..(27): n is a, c, g, or t
  misc_feature (31)..(31): n is a, c, g, or t
  misc_feature (35)..(35): n is a, c, g, or t
  misc_feature (45)..(45): n is a, c, g, or t
tcnagcaattannnnntttggcctgcnggtncctntggcgctgangatctctatgccccgccggcagacggtggattggatgatgacaatgctcacg

SEQ ID NO: 687 - DNA, 166 bp, Unknown Organism
  polynucleotide sequence showing no homology to known genes
  misc_feature (4)..(7): n is a, c, g, or t
  misc_feature (12)..(13): n is a, c, g, or t
  misc_feature (15)..(16): n is a, c, g, or t
  misc_feature (33)..(33): n is a, c, g, or t
  misc_feature (36)..(36): n is a, c, g, or t
  misc_feature (44)..(44): n is a, c, g, or t
  misc_feature (50)..(50): n is a, c, g, or t
  misc_feature (60)..(60): n is a, c, g, or t
  misc_feature (70)..(70): n is a, c, g, or t
  misc_feature (84)..(84): n is a, c, g, or t
  misc_feature (99)..(101): n is a, c, g, or t
  misc_feature (125)..(125): n is a, c, g, or t
  misc_feature (141)..(141): n is a, c, g, or t
  misc_feature (146)..(146): n is a, c, g, or t
  misc_feature (162)..(162): n is a, c, g, or t
tggnnnntcctnncnngccaataaccagccccnggngctatcancataanctaaaaaganccccatacantcaacctggctggnccatcacttagggcnnngtttcaagattatccaacttgggnaatacttatccgccangatcnatagccggatcagacngacg

SEQ ID NO: 688 - DNA, 217 bp, Unknown Organism
  polynucleotide sequence showing no homology to known genes
  misc_feature (67)..(67): n is a, c, g, or t
aagacagggatggcagtgctgagaggagggcaaagattgagcaatggaatagggaaaaagaagaggnagaatctgctaaatacaataattttgacactgataatggcaagagtgatggtggtgatcactatggagaacagtttgatgacgattacccgaagcagcagtaggtagcaaatgggaagttatgggctactgatagtagtggttactctgg

SEQ ID NO: 689 - DNA, 471 bp, Unknown Organism
  polynucleotide sequence showing no homology to known genes
  misc_feature (1)..(1): n is a, c, g, or t
  misc_feature (4)..(4): n is a, c, g, or t
  misc_feature (10)..(10): n is a, c, g, or t
  misc_feature (12)..(13): n is a, c, g, or t
  misc_feature (18)..(19): n is a, c, g, or t
  misc_feature (22)..(22): n is a, c, g, or t
  misc_feature (46)..(46): n is a, c, g, or t
  misc_feature (66)..(66): n is a, c, g, or t
  misc_feature (71)..(71): n is a, c, g, or t
  misc_feature (98)..(98): n is a, c, g, or t
  misc_feature (108)..(108): n is a, c, g, or t
  misc_feature (133)..(133): n is a, c, g, or t
  misc_feature (162)..(162): n is a, c, g, or t
  misc_feature (194)..(194): n is a, c, g, or t
  misc_feature (356)..(356): n is a, c, g, or t
  misc_feature (366)..(366): n is a, c, g, or t
  misc_feature (407)..(407): n is a, c, g, or t
  misc_feature (429)..(429): n is a, c, g, or t
  misc_feature (446)..(446): n is a, c, g, or t
naancccagnannattcnngangcaagggttgatagcgactatcanggctgatgatttttcaccgngcttnggcgggagtagcctgtgctcattgacnggaacccgtntcgcaggaccttcgccatgaatcgntttctcgccatttccgtattgctcgtcanctcagtccttgccggttgcgcgacacattcgncgcctgaactgcgtgcctactcggcggaagagagcaaggagctggcgctggaagccctgagccgtcgaggcctgtcgtttgatgaataccaacagaagaaagccgaactgaccggccagccacaaaaaacctttggtttcgaccgcagggtgaaatgaatgncgagcgcggnatgacgctccacggcgcccaggtgagttaagtgacagggcntgaaaagccgagggttccacangaacctcgggtttttgntttgccatcccgtttccggagcctg

SEQ ID NO: 690 - DNA, 68 bp, Unknown Organism
  polynucleotide sequence showing no homology to known genes
  misc_feature (5)..(5): n is a, c, g, or t
  misc_feature (7)..(7): n is a, c, g, or t
  misc_feature (10)..(10): n is a, c, g, or t
  misc_feature (14)..(14): n is a, c, g, or t
  misc_feature (21)..(22): n is a, c, g, or t
  misc_feature (26)..(27): n is a, c, g, or t
ccatnanttnacantgctggnncatnnacaacccggtgcgcggttcgccgttgcgcggcagttccggc

SEQ ID NO: 691 - DNA, 119 bp, Unknown Organism
  polynucleotide sequence showing no homology to known genes
cggtacgagaagcgtgtgattcaaaaacaactgtgatcatgcaaagtattgagatggaatcttggaatgcatggaactagcgttagatttggttgaaatttgtaattctaatcgcaagc

SEQ ID NO: 692 - DNA, 120 bp, Unknown Organism
  polynucleotide sequence showing no homology to known genes
gggcctcctagcaacatttaggaaccgaataacagcacttctcagtctatacggcatcctgatttgttcatcagctcgtatttcacaggctaccatatcaccagtgttccatgctcagcc

SEQ ID NO: 693 - DNA, 141 bp, Unknown Organism
  polynucleotide sequence showing no homology to known genes
  misc_feature (5)..(5): n is a, c, g, or t
  misc_feature (23)..(23): n is a, c, g, or t
cctcnggcaggtactcaatagcnaacaacttttacatcctcaaattagcacaaatctacatatttcatatacagaacactatagtagagttcatgtttagactattgccaagtctgcatgatctaaacaacaacttccacc

SEQ ID NO: 694 - DNA, 165 bp, Unknown Organism
  polynucleotide sequence showing no homology to known genes
tttcttgttgctcgtgaagagccaataaccagcccccgcagctatcaacataatcaaaaaagaaccaccatagatcaacctggtaggcccatcacttagggcaactttcagattatccaacttcgaaatcttatccgccataatcaatagccgctcagactgacg

SEQ ID NO: 695 - DNA, 56 bp, Unknown Organism
  polynucleotide sequence showing no homology to known genes
  misc_feature (7)..(7): n is a, c, g, or t
  misc_feature (10)..(10): n is a, c, g, or t
  misc_feature (13)..(13): n is a, c, g, or t
  misc_feature (34)..(35): n is a, c, g, or t
  misc_feature (48)..(48): n is a, c, g, or t
tggtcgntgnaanaattttgctggaagctttgtnnaatgaaaaattgntgcttcag

SEQ ID NO: 696 - DNA, 133 bp, Unknown Organism
  polynucleotide sequence showing no homology to known genes
gccagctaagtggctttataacaccaaaagaaagaggccttaggacaactaaatatgacatacacttagacaacatgaatttgccaatttatctgttactatttccattgacctctaaactcacctccatgca

SEQ ID NO: 697 - DNA, 155 bp, Unknown Organism
  polynucleotide sequence showing no homology to known genes
  misc_feature (1)..(1): n is a, c, g, or t
  misc_feature (108)..(108): n is a, c, g, or t
ncgtagctatctttgctgcttctttgatgctttgaatcatctttgatctgtgacgatattttgtgttttatttcgccggagttgaacagttaggagtttatttatggntttatttttcactgttttttgttcattcttttttttacttcttgaca

SEQ ID NO: 698 - DNA, 215 bp, Unknown Organism
  polynucleotide sequence showing no homology to known genes
gatgcatgtgtcacagaagagatgccatagttccatattaggaattgataagatgtgctaagatcaatataggtcacttagtattattctcttctaggcactagtttcaggtcatattttagttttatgggatgcatttcgtaaacttgttcttgcctttcagtttcattttgtatgtatatgtcactggtccatattgttgttgacactcggca

SEQ ID NO: 699 - DNA, 327 bp, Unknown Organism
  polynucleotide sequence showing no homology to known genes
  misc_feature (33)..(33): n is a, c, g, or t
  misc_feature (48)..(48): n is a, c, g, or t
  misc_feature (69)..(69): n is a, c, g, or t
  misc_feature (79)..(79): n is a, c, g, or t
  misc_feature (114)..(114): n is a, c, g, or t
  misc_feature (123)..(123): n is a, c, g, or t
  misc_feature (135)..(135): n is a, c, g, or t
  misc_feature (138)..(138): n is a, c, g, or t
  misc_feature (144)..(144): n is a, c, g, or t
  misc_feature (171)..(171): n is a, c, g, or t
  misc_feature (179)..(179): n is a, c, g, or t
  misc_feature (186)..(186): n is a, c, g, or t
  misc_feature (189)..(189): n is a, c, g, or t
  misc_feature (194)..(194): n is a, c, g, or t
  misc_feature (207)..(207): n is a, c, g, or t
  misc_feature (238)..(239): n is a, c, g, or t
  misc_feature (243)..(243): n is a, c, g, or t
  misc_feature (252)..(252): n is a, c, g, or t
  misc_feature (267)..(268): n is a, c, g, or t
  misc_feature (285)..(285): n is a, c, g, or t
  misc_feature (288)..(288): n is a, c, g, or t
  misc_feature (292)..(292): n is a, c, g, or t
  misc_feature (310)..(310): n is a, c, g, or t
  misc_feature (314)..(314): n is a, c, g, or t
  misc_feature (317)..(317): n is a, c, g, or t
  misc_feature (319)..(319): n is a, c, g, or t
  misc_feature (322)..(322): n is a, c, g, or t
  misc_feature (326)..(326): n is a, c, g, or t
gatggacgtgttattggtggtggagttgccggnctattggtaggctgncagtcctgtgcagattgttgngggcagcttncttgatggaattcagctcgagcagacgaccaaganaaacaagtncgagcccatagntgnagctgntcctctatctagtacagatatggaaancgcctatnactcatnatnagcanaaccaactgtagnatcggattcttccttacatgaagataactgnncatnattagcccncgacttgaggaatanncctgctgacatcaatgnatntaancctgcataggtttttgtngaantgnanttnatcng

SEQ ID NO: 700 - DNA, 52 bp, Unknown Organism
  polynucleotide sequence showing no homology to known genes
  misc_feature (1)..(1): n is a, c, g, or t
  misc_feature (16)..(16): n is a, c, g, or t
  misc_feature (23)..(23): n is a, c, g, or t
  misc_feature (36)..(37): n is a, c, g, or t
  misc_feature (43)..(43): n is a, c, g, or t
  misc_feature (45)..(45): n is a, c, g, or t
  misc_feature (50)..(50): n is a, c, g, or t
nctgaagaaggtcctntcgggangaaatagctaggnngtcttngnttcanct

SEQ ID NO: 701 - DNA, 78 bp, Unknown Organism
  polynucleotide sequence showing no homology to known genes
  misc_feature (1)..(1): n is a, c, g, or t
  misc_feature (63)..(63): n is a, c, g, or t
nctgattgttcttacaaataggtcaatcttagtccaagtaagtatattctcttacttctgtanttttccagatttggt

SEQ ID NO: 702 - DNA, 81 bp, Unknown Organism
  polynucleotide sequence showing no homology to known genes
  misc_feature (49)..(49): n is a, c, g, or t
  misc_feature (61)..(61): n is a, c, g, or t
  misc_feature (64)..(64): n is a, c, g, or t
  misc_feature (67)..(68): n is a, c, g, or t
  misc_feature (72)..(72): n is a, c, g, or t
taagggatcacgaccctacgggagatcatatgagcgtgggttctactgnctcgacgggctntgnagnngganggaaaccat

SEQ ID NO: 703 - DNA, 106 bp, Unknown Organism
  polynucleotide sequence showing no homology to known genes
  misc_feature (4)..(4): n is a, c, g, or t
  misc_feature (17)..(17): n is a, c, g, or t
  misc_feature (19)..(19): n is a, c, g, or t
  misc_feature (36)..(36): n is a, c, g, or t
  misc_feature (79)..(79): n is a, c, g, or t
  misc_feature (90)..(90): n is a, c, g, or t
gaangaaggttccaagngnctcccattgtggagcantatcacctacacattgtagggctaattatcttttcacttcacncggtagaggancagattgcatagctgt

SEQ ID NO: 704 - DNA, 129 bp, Unknown Organism
  polynucleotide sequence showing no homology to known genes
  misc_feature (1)..(2): n is a, c, g, or t
  misc_feature (41)..(41): n is a, c, g, or t
  misc_feature (66)..(66): n is a, c, g, or t
nntgatgtcccttcctttctggtgtcgtatccggctttttncgtggaagcggtgttgctaaatcgngtgtccgacggccctttactgtactggaacgacatttctcattttgttgctgctgtttacggt

SEQ ID NO: 705 - DNA, 97 bp, Unknown Organism
  polynucleotide sequence showing no homology to known genes
gatatcttcatctttgcgctttatgttcttcacatccacaagtattggtgtgttttctgcattatcatttctcagtagtttccttctctgtttctcc

SEQ ID NO: 706 - DNA, 20 bp, Unknown Organism
  polynucleotide sequence showing no homology to known genes
  misc_feature (13)..(13): n is a, c, g, or t
cgaagaagaaganacttacg

SEQ ID NO: 707 - DNA, 87 bp, Unknown Organism
  polynucleotide sequence showing no homology to known genes
  misc_feature (17)..(17): n is a, c, g, or t
  misc_feature (19)..(19): n is a, c, g, or t
  misc_feature (39)..(39): n is a, c, g, or t
  misc_feature (44)..(44): n is a, c, g, or t
  misc_feature (49)..(49): n is a, c, g, or t
  misc_feature (60)..(60): n is a, c, g, or t
  misc_feature (65)..(66): n is a, c, g, or t
  misc_feature (73)..(74): n is a, c, g, or t
  misc_feature (82)..(82): n is a, c, g, or t
cacggaaatcacgccgncnttggtaccttgaccgggttncctanagggnacttcagtcantgggnngcccagnnactgaggnggccg

SEQ ID NO: 708 - DNA, 66 bp, Unknown Organism
  polynucleotide sequence showing no homology to known genes
  misc_feature (11)..(11): n is a, c, g, or t
catctggattnaacaatttcatggccaggttttcaaaaaaataaaacaaggtcttcatggccgtgc

SEQ ID NO: 709 - DNA, 70 bp, Unknown Organism
  polynucleotide sequence showing no homology to known genes
  misc_feature (1)..(1): n is a, c, g, or t
naaccttactgtacaaaggaaatcattggttgcttgggataaagtctgcatgcccaaaactgaggtggcc

SEQ ID NO: 710 - DNA, 138 bp, Unknown Organism
  polynucleotide sequence showing no homology to known genes
  misc_feature (4)..(5): n is a, c, g, or t
  misc_feature (40)..(40): n is a, c, g, or t
  misc_feature (46)..(46): n is a, c, g, or t
  misc_feature (66)..(66): n is a, c, g, or t
  misc_feature (85)..(85): n is a, c, g, or t
  misc_feature (101)..(102): n is a, c, g, or t
  misc_feature (105)..(105): n is a, c, g, or t
  misc_feature (110)..(110): n is a, c, g, or t
  misc_feature (130)..(130): n is a, c, g, or t
cggnnttttgacaaaggttcccgcttacacactcctcgtncgatgngctccctgacccgagtgttntcgcgcagcagtgtcatgntcaaaaccaggattgnnttnaaaangacaggacttcaggtcattnattccgcc

SEQ ID NO: 711 - DNA, 48 bp, Unknown Organism
  polynucleotide sequence showing no homology to known genes
  misc_feature (4)..(4): n is a, c, g, or t
  misc_feature (6)..(7): n is a, c, g, or t
attntnntttttggaatggtaaatacaggttggatagaagctttccca

SEQ ID NO: 712 - DNA, 66 bp, Unknown Organism
  polynucleotide sequence showing no homology to known genes
  misc_feature (8)..(8): n is a, c, g, or t
  misc_feature (14)..(14): n is a, c, g, or t
  misc_feature (64)..(64): n is a, c, g, or t
gcaaatanttatangaaaaggtcaaggaaacactaagtgtgtcataaataggattatctattanta

SEQ ID NO: 713 - DNA, 82 bp, Unknown Organism
  polynucleotide sequence showing no homology to known genes
  misc_feature (3)..(4): n is a, c, g, or t
  misc_feature (10)..(10): n is a, c, g, or t
  misc_feature (12)..(12): n is a, c, g, or t
  misc_feature (24)..(24): n is a, c, g, or t
  misc_feature (26)..(26): n is a, c, g, or t
  misc_feature (62)..(62): n is a, c, g, or t
  misc_feature (75)..(75): n is a, c, g, or t
  misc_feature (78)..(78): n is a, c, g, or t
ctnnctttgntngacgagagtaanancttggcagctatcttccaagccattttcaagggctntgcatctgtagtnctntgca

SEQ ID NO: 714 - DNA, 57 bp, Unknown Organism
  polynucleotide sequence showing no homology to known genes
ctgatagtctgatgggcttccctttgagggtaacccgacctttctctctggctgccc

SEQ ID NO: 715 - DNA, 54 bp, Unknown Organism
  polynucleotide sequence showing no homology to known genes
  misc_feature (3)..(3): n is a, c, g, or t
  misc_feature (11)..(11): n is a, c, g, or t
  misc_feature (13)..(13): n is a, c, g, or t
  misc_feature (28)..(30): n is a, c, g, or t
  misc_feature (36)..(36): n is a, c, g, or t
  misc_feature (43)..(43): n is a, c, g, or t
ganccagcggnantagctgctgtactannnacaggnatccaanatatgaaagct

SEQ ID NO: 716 - DNA, 113 bp, Unknown Organism
  polynucleotide sequence showing no homology to known genes
  misc_feature (6)..(6): n is a, c, g, or t
  misc_feature (40)..(40): n is a, c, g, or t
  misc_feature (69)..(69): n is a, c, g, or t
  misc_feature (80)..(80): n is a, c, g, or t
  misc_feature (104)..(104): n is a, c, g, or t
  misc_feature (109)..(109): n is a, c, g, or t
agcacntccggctgtatcttactaccagagaaattacagntgtggacatatctcgaagatgaatcaatngaatatatctnctaatgaaattgtcttgctctttngttgngtat

SEQ ID NO: 717 - DNA, 291 bp, Unknown Organism
  polynucleotide sequence showing no homology to known genes
  misc_feature (16)..(16): n is a, c, g, or t
  misc_feature (40)..(40): n is a, c, g, or t
  misc_feature (43)..(43): n is a, c, g, or t
  misc_feature (48)..(49): n is a, c, g, or t
  misc_feature (56)..(56): n is a, c, g, or t
  misc_feature (65)..(65): n is a, c, g, or t
  misc_feature (97)..(97): n is a, c, g, or t
  misc_feature (113)..(114): n is a, c, g, or t
  misc_feature (123)..(123): n is a, c, g, or t
  misc_feature (163)..(163): n is a, c, g, or t
  misc_feature (166)..(166): n is a, c, g, or t
  misc_feature (175)..(176): n is a, c, g, or t
  misc_feature (182)..(182): n is a, c, g, or t
  misc_feature (184)..(184): n is a, c, g, or t
  misc_feature (192)..(192): n is a, c, g, or t
  misc_feature (200)..(200): n is a, c, g, or t
  misc_feature (209)..(209): n is a, c, g, or t
  misc_feature (221)..(221): n is a, c, g, or t
  misc_feature (224)..(224): n is a, c, g, or t
  misc_feature (229)..(229): n is a, c, g, or t
  misc_feature (233)..(233): n is a, c, g, or t
  misc_feature (235)..(236): n is a, c, g, or t
  misc_feature (244)..(247): n is a, c, g, or t
  misc_feature (250)..(250): n is a, c, g, or t
  misc_feature (256)..(256): n is a, c, g, or t
  misc_feature (259)..(259): n is a, c, g, or t
  misc_feature (262)..(262): n is a, c, g, or t
  misc_feature (267)..(267): n is a, c, g, or t
  misc_feature (270)..(270): n is a, c, g, or t
  misc_feature (273)..(273): n is a, c, g, or t
  misc_feature (275)..(275): n is a, c, g, or t
  misc_feature (280)..(280): n is a, c, g, or t
  misc_feature (287)..(288): n is a, c, g, or t
actggtccaaaagctncaaaaatttgtctaagctgtactntgncatgnngaaatgnagatttccnacataaagttttctctctgaggcagcatttgngcctgccaaccctganncaccaccanacgcagttgactgaacaagggttttttcaagcttcagaangcnttaccaatnntgggtngnccaaaaancaaggcancgggtaaangaattggccatnggnccaancttngnntataaaannnnaangtcccnaantcntttanatngcntngaatnccggccnntga

SEQ ID NO: 718 - DNA, 107 bp, Unknown Organism
  polynucleotide sequence showing no homology to known genes
  misc_feature (12)..(12): n is a, c, g, or t
  misc_feature (33)..(33): n is a, c, g, or t
  misc_feature (45)..(45): n is a, c, g, or t
  misc_feature (56)..(56): n is a, c, g, or t
  misc_feature (82)..(82): n is a, c, g, or t
gatttagtgatnaatttccagcttattttttgntgtgagaggagngcagtatcagnactccttctggcgccaggataccatnaacaggtagccatcgaaggtgtaca

SEQ ID NO: 719 - DNA, 155 bp, Unknown Organism
  polynucleotide sequence showing no homology to known genes
  misc_feature (7)..(7): n is a, c, g, or t
gggaagntccaaacaaaaaagaaaaacgcagtaataccctccaaaaagcttcatctttctcaccaaagcctctttgctttggccatagaaaccagtaaccattagctatgtaaaaccattgcagctaccattttagaaacagtttcgaaacgcca

SEQ ID NO: 720 - DNA, 223 bp, Unknown Organism
  polynucleotide sequence showing no homology to known genes
  misc_feature (8)..(8): n is a, c, g, or t
  misc_feature (21)..(21): n is a, c, g, or t
  misc_feature (34)..(34): n is a, c, g, or t
  misc_feature (40)..(41): n is a, c, g, or t
  misc_feature (47)..(48): n is a, c, g, or t
  misc_feature (52)..(53): n is a, c, g, or t
  misc_feature (61)..(62): n is a, c, g, or t
  misc_feature (65)..(65): n is a, c, g, or t
  misc_feature (76)..(76): n is a, c, g, or t
  misc_feature (78)..(78): n is a, c, g, or t
  misc_feature (81)..(81): n is a, c, g, or t
  misc_feature (96)..(96): n is a, c, g, or t
  misc_feature (107)..(108): n is a, c, g, or t
  misc_feature (113)..(113): n is a, c, g, or t
  misc_feature (128)..(128): n is a, c, g, or t
  misc_feature (131)..(131): n is a, c, g, or t
  misc_feature (134)..(134): n is a, c, g, or t
  misc_feature (154)..(154): n is a, c, g, or t
  misc_feature (157)..(157): n is a, c, g, or t
  misc_feature (188)..(188): n is a, c, g, or t
  misc_feature (199)..(199): n is a, c, g, or t
agcccttngtcagcccacctnttatgctcaatcncaccgnnaggaannctgnnagagttanngangcgattgattncngcnctgacagatcatatngcttctataanngttgngcggacacgcgaatnagnttncttaccctcgcataagacanatnctgatcttaccaaccactcattagatgtggnacctacagcanctacatcttctactgctgctaaca

SEQ ID NO: 721 - DNA, 246 bp, Unknown Organism
  polynucleotide sequence showing no homology to known genes
  misc_feature (8)..(8): n is a, c, g, or t
  misc_feature (10)..(10): n is a, c, g, or t
  misc_feature (14)..(14): n is a, c, g, or t
  misc_feature (59)..(59): n is a, c, g, or t
  misc_feature (109)..(109): n is a, c, g, or t
  misc_feature (122)..(122): n is a, c, g, or t
  misc_feature (215)..(215): n is a, c, g, or t
aggcattntncagngcgccacaagtatactggatttcccggagacatgtgactggagangcatcaccgcaagatttgtccgctcaaactctcattgatgctgccattgncatacaaaagtgnattcagcgggtggatagtaaggtcttctcttgtaagcacggaccaatctcctacagttcctaaggaatgtgaagagaatataaatgcagcggnagcaatccaacatgcttcaaaggaatataca

SEQ ID NO: 722 - DNA, 37 bp, Unknown Organism
  polynucleotide sequence showing no homology to known genes
ggaaacatacaacgaatgccaaaatctgccattttga

SEQ ID NO: 723 - DNA, 66 bp, Unknown Organism
  polynucleotide sequence showing no homology to known genes
  misc_feature (17)..(17): n is a, c, g, or t
  misc_feature (21)..(21): n is a, c, g, or t
ctttccgaatgctaccngatngtatcaattggggtgaactggttggggtttttttccccctttacc

SEQ ID NO: 724 - DNA, 89 bp, Unknown Organism
  polynucleotide sequence showing no homology to known genes
  misc_feature (3)..(3): n is a, c, g, or t
  misc_feature (8)..(8): n is a, c, g, or t
  misc_feature (11)..(11): n is a, c, g, or t
  misc_feature (72)..(72): n is a, c, g, or t
tcnttgcnganatctaccttacatgttcctgatgcaatcatgacttactctgatttacacatgggttgctgngggctgattccatgtcc

SEQ ID NO: 725 - DNA, 104 bp, Unknown Organism
  polynucleotide sequence showing no homology to known genes
gccttaaatggtgtgttctaacaggcttatgggtatgctggcattctccattgctgggcatacccacagcctgcccttgcctctttcaattttcctattccccc

SEQ ID NO: 726 - DNA, 148 bp, Unknown Organism
  polynucleotide sequence showing no homology to known genes
  misc_feature (4)..(4): n is a, c, g, or t
  misc_feature (12)..(12): n is a, c, g, or t
  misc_feature (17)..(18): n is a, c, g, or t
  misc_feature (22)..(22): n is a, c, g, or t
  misc_feature (36)..(36): n is a, c, g, or t
  misc_feature (38)..(39): n is a, c, g, or t
  misc_feature (43)..(44): n is a, c, g, or t
  misc_feature (47)..(47): n is a, c, g, or t
  misc_feature (66)..(66): n is a, c, g, or t
  misc_feature (69)..(69): n is a, c, g, or t
  misc_feature (72)..(72): n is a, c, g, or t
  misc_feature (75)..(75): n is a, c, g, or t
  misc_feature (77)..(78): n is a, c, g, or t
  misc_feature (86)..(86): n is a, c, g, or t
  misc_feature (96)..(96): n is a, c, g, or t
  misc_feature (134)..(134): n is a, c, g, or t
  misc_feature (136)..(136): n is a, c, g, or t
gcgntacttcanagtcnngganagaggctaagaggncnnacannaantgcttcagtactaatgaancanatnctngnntctttttnagggacatancaggttttgacaagcccccacatgaataagaatatatnanacttctctaacc

SEQ ID NO: 727 - DNA, 166 bp, Unknown Organism
  polynucleotide sequence showing no homology to known genes
  misc_feature (86)..(86): n is a, c, g, or t
ttactgtttgtcctacctggtgatggatagtttgggttctgaataatttgtgggatgcaacaacaagcttttggttactttttgtnaagtacagtggttacttgaactagttgtgtaatatatgctatggtagtggtcgtatctcgaaacacgtgatatttagtgc

SEQ ID NO: 728 - DNA, 60 bp, Unknown Organism
  polynucleotide sequence showing no homology to known genes
gccttggtaagacattcgtgaaaaaactctgttatttcttagagataaggtggttcccgc

SEQ ID NO: 729 - DNA, 168 bp, Unknown Organism
  polynucleotide sequence showing no homology to known genes
gactcttgccaaaattgtatctaaatcctcatcttcctttgggattggccaagattggctggcaatgttggggcatttttgttcgagttgttcatgttggacaagtgactacctgatttagatgttgcagagcaaagctgtgcgattgtgttgtatgttattcttcta

SEQ ID NO: 730 - DNA, 500 bp, Unknown Organism
  polynucleotide sequence showing no homology to known genes
  misc_feature (149)..(149): n is a, c, g, or t
  misc_feature (208)..(208): n is a, c, g, or t
  misc_feature (376)..(376): n is a, c, g, or t
  misc_feature (405)..(405): n is a, c, g, or t
  misc_feature (428)..(428): n is a, c, g, or t
  misc_feature (452)..(452): n is a, c, g, or t
gcccgacgcttgaaagattgcatttggagaaatgccaattgagaaataaggagagcttgagaacattgtttctactctgtcaagacgtcagagaggttattttccagaactgttggggactggataatgaaatgttcagccttgccagngttctaaggagagtgaagtccctttgcctggaaagctgttcactactcacaactgaagnccttgagtctgtcctcctttcatggaaggaaatccagagcctcaaggtgatttcatgtggcaatataaaggatagtgaaatcagtctagcactgtctaccttgttctccgcactaaaagatttacaatggagaccagactcaaaatctcttctttcagctggtgttgngggaacttgcatgcggaaaagaggcaatnaaatttttcaaagaagaccgtgngacttggaagtcacttgcctgggngcatagactggccttcctcatcatgcattcaggacaactctactatat

SEQ ID NO: 731 - DNA, 35 bp, Unknown Organism
  polynucleotide sequence showing no homology to known genes
taggttttgtttagtgttttctaagttcttgtttt

SEQ ID NO: 732 - DNA, 89 bp, Unknown Organism
  polynucleotide sequence showing no homology to known genes
  misc_feature (6)..(6): n is a, c, g, or t
gaagcnactagttcaaaatatgtgcagtgttgatcatattcttttgttatggccagtttttaccatttgttggacacgtttgatgctgt

SEQ ID NO: 733 - DNA, 254 bp, Unknown Organism
  polynucleotide sequence showing no homology to known genes
  misc_feature (8)..(9): n is a, c, g, or t
  misc_feature (11)..(11): n is a, c, g, or t
  misc_feature (19)..(19): n is a, c, g, or t
  misc_feature (25)..(26): n is a, c, g, or t
  misc_feature (28)..(28): n is a, c, g, or t
  misc_feature (31)..(31): n is a, c, g, or t
  misc_feature (38)..(38): n is a, c, g, or t
  misc_feature (53)..(53): n is a, c, g, or t
  misc_feature (75)..(75): n is a, c, g, or t
  misc_feature (77)..(77): n is a, c, g, or t
  misc_feature (134)..(134): n is a, c, g, or t
gcccgtannangggttccnacaccnncntanggtcctnttttccttctgaatngagcctgcgataaactccatananaactagcaaaaagagctccattttttcactaaaaacaaccgttcaaacagctatganaatccctctatctccatcaaaaccgcagcatccatcatcctcaataaagggctgcacaaacctgctacaatcagcataaaaacagccctgaaactagcttctttcgagctaaaatcaact

SEQ ID NO: 734 - DNA, 43 bp, Unknown Organism
  polynucleotide sequence showing no homology to known genes
  misc_feature (9)..(9): n is a, c, g, or t
  misc_feature (18)..(18): n is a, c, g, or t
tgtgctaangtagcccgntcttatcaataagtgcaaagtttgg

SEQ ID NO: 735 - DNA, 90 bp, Unknown Organism
  polynucleotide sequence showing no homology to known genes
  misc_feature (17)..(17): n is a, c, g, or t
  misc_feature (21)..(22): n is a, c, g, or t
  misc_feature (74)..(75): n is a, c, g, or t
taataaagccccggganaagnnaagaaaaaaaagagaaaaagaaactaggccgggtcaaggcaggccatattgnnagcactactgcctgg

SEQ ID NO: 736 - DNA, 323 bp, Unknown Organism
  polynucleotide sequence showing no homology to known genes
  misc_feature (3)..(3): n is a, c, g, or t
  misc_feature (28)..(28): n is a, c, g, or t
tgngaccttttgaatctcccgagtctgnaggtctagtttactcccaatagacgagtatcactacaagtctactgcaaatggttgatgtttgatgtgggagacgaaacgataagcaatttagtaacatgtgtcctttttcacgtatatatagatagagcaagaatgaaaatggagacaccttttccatttttgaaggatatattgctgtttcttccctcaaagagagttttgtgcactatgtttggtagcttttcgagagtagtatgtttttatctcgttgaagcaacctccttttttcccccttgactagttgacttgaaggg

SEQ ID NO: 737 - DNA, 61 bp, Unknown Organism
  polynucleotide sequence showing no homology to known genes
tgtttgtttatgaccctgctgggtcattggtaattatgtgtttagtactatgtcttggtgc

SEQ ID NO: 738 - DNA, 62 bp, Unknown Organism
  polynucleotide sequence showing no homology to known genes
  misc_feature (17)..(17): n is a, c, g, or t
  misc_feature (51)..(51): n is a, c, g, or t
ctttcgtcggagctttngccgccgccggctaccatcagtacaatcctccgngctgggcgccc

SEQ ID NO: 739 - DNA, 106 bp, Unknown Organism
  polynucleotide sequence showing no homology to known genes
  misc_feature (25)..(25): n is a, c, g, or t
  misc_feature (47)..(47): n is a, c, g, or t
tgaatcaccttttaaaaccacgggnaaaagtaaaagtaaaaaaaagnaggaaaaaggaaactaggccgggtcaagggcaggccatattgacagcactactgcctcg

SEQ ID NO: 740 - DNA, 127 bp, Unknown Organism
  polynucleotide sequence showing no homology to known genes
  misc_feature (41)..(41): n is a, c, g, or t
  misc_feature (83)..(84): n is a, c, g, or t
  misc_feature (114)..(114): n is a, c, g, or t
tgcgagacattgcaactaagcaagctctttccctacattgncgtatcccagcacacagatatcacggggcatggagccatccnncagtgtcaaccagtgcgctatataggcggngacatgcggcgcg

SEQ ID NO: 741 - DNA, 113 bp, Unknown Organism
  polynucleotide sequence showing no homology to known genes
  misc_feature (2)..(4): n is a, c, g, or t
  misc_feature (6)..(6): n is a, c, g, or t
  misc_feature (11)..(11): n is a, c, g, or t
  misc_feature (34)..(34): n is a, c, g, or t
  misc_feature (54)..(54): n is a, c, g, or t
gnnngnggagnaagcaagcatagaaggagcaaantgttcattcactgtgagtangaagacaaagcaagaaataattcagaagctgattgaaatagtaaatgaaatatcaagca

SEQ ID NO: 742 - DNA, 233 bp, Unknown Organism
  polynucleotide sequence showing no homology to known genes
ccctgcctgggaaatggtcaatttgaggaagggcattggcagctaacttgttatatgcgcaaagtcttgtatgacatagaagtagatggcaacagacaacaagttccaccagatgattccaaggttcaaactcaagaatcaaggtgtttttatgaaggaaatcaacataatgacaatgatggctactgggactataacttcttatttggaggtgcaggtggaggagaacatag

SEQ ID NO: 743 - DNA, 336 bp, Unknown Organism
  polynucleotide sequence showing no homology to known genes
  misc_feature (125)..(125): n is a, c, g, or t
  misc_feature (128)..(128): n is a, c, g, or t
  misc_feature (304)..(305): n is a, c, g, or t
  misc_feature (310)..(310): n is a, c, g, or t
cctcagtctgaaaattccaacaccaatatgccccaatttgattctagcttgacccgtaacaatattggatcaaccccatattatggaagtcatgaaaacatgacatcaactaattaccatatggnganttatcataatatggtgcttcccaaggaaaatatgtcaaattttgaagagggttcttgttcaatagattcttatgacatgcaaacagatcatcacaacagtcgatggacatttcaagatgatggagatgaccttcagtcagtggctttcagatatcttcaacattcttgatcagtanntaggncttcaaaaacaaatcatgggtgaaga

SEQ ID NO: 744 - DNA, 246 bp, Unknown Organism
  polynucleotide sequence showing no homology to known genes
  misc_feature (2)..(2): n is a, c, g, or t
  misc_feature (5)..(5): n is a, c, g, or t
  misc_feature (14)..(14): n is a, c, g, or t
  misc_feature (25)..(25): n is a, c, g, or t
  misc_feature (32)..(32): n is a, c, g, or t
  misc_feature (36)..(36): n is a, c, g, or t
  misc_feature (44)..(44): n is a, c, g, or t
  misc_feature (52)..(52): n is a, c, g, or t
  misc_feature (73)..(73): n is a, c, g, or t
  misc_feature (79)..(79): n is a, c, g, or t
  misc_feature (84)..(85): n is a, c, g, or t
  misc_feature (96)..(96): n is a, c, g, or t
  misc_feature (105)..(105): n is a, c, g, or t
  misc_feature (107)..(108): n is a, c, g, or t
  misc_feature (121)..(121): n is a, c, g, or t
  misc_feature (128)..(128): n is a, c, g, or t
  misc_feature (132)..(132): n is a, c, g, or t
  misc_feature (148)..(151): n is a, c, g, or t
  misc_feature (161)..(161): n is a, c, g, or t
  misc_feature (166)..(166): n is a, c, g, or t
  misc_feature (173)..(173): n is a, c, g, or t
  misc_feature (197)..(197): n is a, c, g, or t
  misc_feature (233)..(233): n is a, c, g, or t
  misc_feature (235)..(235): n is a, c, g, or t
  misc_feature (237)..(237): n is a, c, g, or t
  misc_feature (239)..(239): n is a, c, g, or t
tnctntcatggtgngcctacattcnggacacngtantgatcctngccagcangattgtcttacgctactacanttggancgatnngccttacctgncggttttantnngaggacaataagntcgaccntccnatctgcctgagcattnnnnctatgatgancgatngggaggncattgtgccatctgcgagttgaangattatccacagtgagagccggaaacccctgcaatncnanantctgggt

SEQ ID NO: 745 - DNA, 29 bp, Unknown Organism
  polynucleotide sequence showing no homology to known genes
  misc_feature (5)..(6): n is a, c, g, or t
  misc_feature (13)..(13): n is a, c, g, or t
  misc_feature (15)..(15): n is a, c, g, or t
  misc_feature (17)..(17): n is a, c, g, or t
ccttnngtggctngngntgtgctctgcgt

SEQ ID NO: 746 - DNA, 161 bp, Unknown Organism
  polynucleotide sequence showing no homology to known genes
  misc_feature (2)..(2): n is a, c, g, or t
gnttgtcctacctggtgatggatagtttgggttctgaataatttgtgggatgcaacaacaagcttttggttactttttgtcaagtacagtggttacttgaactagttgtgtaatatatgctatggtagtggtcgtatctcgaaacacgtgatatttagtgc

SEQ ID NO: 747 - DNA, 183 bp, Unknown Organism
  polynucleotide sequence showing no homology to known genes
  misc_feature (1)..(1): n is a, c, g, or t
nctttgaatttgaaccactacctaatatgaaagaatgcctgctcgtaatgaaatacttgtcatggtgtctctaccgagtcctttggctagggcaactcaatcaatatgcagtcgtaagaatgttttgaaatgcatatgtagtcatcatcggtgttttcacatttatgtgaatttggatgttcg

SEQ ID NO: 748 - DNA, 90 bp, Unknown Organism
  polynucleotide sequence showing no homology to known genes
  misc_feature (32)..(32): n is a, c, g, or t
  misc_feature (79)..(79): n is a, c, g, or t
cctgcttgaggtccattcttttttctcctttnttttagttcgataacactatatgcgggtctctgatggttgtcgcgtntttttgggtgc

SEQ ID NO: 749 - DNA, 156 bp, Unknown Organism
  polynucleotide sequence showing no homology to known genes
tttggaatacaattcaacttctgtttcctaaagaaatagaagcaagaaaagcagctggagctttgaatagtagagaagctcgacgcaaaagtccagtaagagctgctacagctcattctaacatctctagcagcagaatatcaagagtgttcgcgc

SEQ ID NO: 750 - DNA, 170 bp, Unknown Organism
  polynucleotide sequence showing no homology to known genes
  misc_feature (29)..(29): n is a, c, g, or t
  misc_feature (33)..(33): n is a, c, g, or t
cagtatcccccttacttgtgtcaaatcancttntcccagtatggcttccatattttgactacaattcttatcagaaggcatgatagtaataagtgacaaagatgcaaaaaacataaaagttgtccttcacttttggttagaggctgaagatgaactttctaagttggaca

SEQ ID NO: 751 - DNA, 27 bp, Unknown Organism
  polynucleotide sequence showing no homology to known genes
ttcgatcggtgaagcttctttaccaac

SEQ ID NO: 752 - DNA, 66 bp, Unknown Organism
  polynucleotide sequence showing no homology to known genes
  misc_feature (8)..(8): n is a, c, g, or t
  misc_feature (14)..(14): n is a, c, g, or t
  misc_feature (17)..(17): n is a, c, g, or t
tacaaagnaatgcngtnccaaaatacattgaaataattggcagccgaatactaaacttgatcatgt

SEQ ID NO: 753 - DNA, 144 bp, Unknown Organism
  polynucleotide sequence showing no homology to known genes
cccgaatttcgtccgccaaattgtcgtgcataggaacagaacgagagccatcaatgccgtaggcgcctttcgcgtaccacatgacccgagaaaaaacaccggaaaggatttccgtgatttgtttctcggtgtagctacgccgca

SEQ ID NO: 754 - DNA, 76 bp, Unknown Organism
  polynucleotide sequence showing no homology to known genes
  misc_feature (6)..(6): n is a, c, g, or t
  misc_feature (10)..(10): n is a, c, g, or t
  misc_feature (18)..(18): n is a, c, g, or t
  misc_feature (25)..(26): n is a, c, g, or t
  misc_feature (44)..(45): n is a, c, g, or t
  misc_feature (55)..(55): n is a, c, g, or t
ttggtnttgncacctgcnaatggcnntacatggagcagggacgnnaataagtggnacgagtgaccacatgagggag

SEQ ID NO: 755 - DNA, 111 bp, Unknown Organism
  polynucleotide sequence showing no homology to known genes
  misc_feature (7)..(7): n is a, c, g, or t
  misc_feature (50)..(50): n is a, c, g, or t
  misc_feature (52)..(52): n is a, c, g, or t
  misc_feature (61)..(61): n is a, c, g, or t
catctcntcctcacttcttgaactgtacgcccaccctttttcttcttggntntgttcttanaagtttctggcacctgctttttgcttctattatcatcagcttcttcagga

SEQ ID NO: 756 - DNA, 318 bp, Unknown Organism
  polynucleotide sequence showing no homology to known genes
  misc_feature (1)..(1): n is a, c, g, or t
  misc_feature (36)..(36): n is a, c, g, or t
  misc_feature (110)..(110): n is a, c, g, or t
  misc_feature (174)..(174): n is a, c, g, or t
  misc_feature (224)..(224): n is a, c, g, or t
  misc_feature (244)..(244): n is a, c, g, or t
  misc_feature (253)..(254): n is a, c, g, or t
  misc_feature (272)..(272): n is a, c, g, or t
  misc_feature (282)..(282): n is a, c, g, or t
  misc_feature (285)..(286): n is a, c, g, or t
  misc_feature (292)..(292): n is a, c, g, or t
  misc_feature (296)..(296): n is a, c, g, or t
  misc_feature (312)..(312): n is a, c, g, or t
nacaccaatatgccccaatttgattctagcttgacntgtaacaatattggatcaaccccatattatggaagtcatgaaaacatgacatcaactaattaccatatggaganttatcataatatggtgcttcccaaggaaaatatgtcaaattttgaagagggttcttgttcaatngattcttatgacatgcaaacagatcatcacaacagtcgatggacatttcnagatgatggagatgaccttnagtcagtgnntttcagatatcttcaacnttcttgatcngtnnctatgncttnaaaaacatatcatggntgatga

SEQ ID NO: 757 - DNA, 192 bp, Unknown Organism
  polynucleotide sequence showing no homology to known genes
  misc_feature (19)..(19): n is a, c, g, or t
  misc_feature (49)..(49): n is a, c, g, or t
  misc_feature (83)..(83): n is a, c, g, or t
  misc_feature (88)..(88): n is a, c, g, or t
  misc_feature (122)..(122): n is a, c, g, or t
ctttggggccgttcttggnatccgtcgaactagggtgttgaaatttctnttttttcttctttattgggttctattatcgattncatgngatattttatttccttatttgtgtttgagtaatngttttccatgtttgcttgttcgatttctaccactatataacccctccccaattacccttttggacagacc

SEQ ID NO: 758 - DNA, 191 bp, Unknown Organism
  polynucleotide sequence showing no homology to known genes
  misc_feature (5)..(5): n is a, c, g, or t
  misc_feature (10)..(10): n is a, c, g, or t
  misc_feature (13)..(13): n is a, c, g, or t
  misc_feature (21)..(21): n is a, c, g, or t
  misc_feature (23)..(23): n is a, c, g, or t
  misc_feature (25)..(25): n is a, c, g, or t
  misc_feature (30)..(30): n is a, c, g, or t
  misc_feature (37)..(37): n is a, c, g, or t
  misc_feature (39)..(39): n is a, c, g, or t
  misc_feature (46)..(46): n is a, c, g, or t
  misc_feature (63)..(64): n is a, c, g, or t
  misc_feature (67)..(68): n is a, c, g, or t
  misc_feature (77)..(77): n is a, c, g, or t
  misc_feature (86)..(86): n is a, c, g, or t
  misc_feature (97)..(97): n is a, c, g, or t
  misc_feature (105)..(105): n is a, c, g, or t
  misc_feature (126)..(126): n is a, c, g, or t
  misc_feature (135)..(135): n is a, c, g, or t
  misc_feature (141)..(141): n is a, c, g, or t
  misc_feature (147)..(147): n is a, c, g, or t
  misc_feature (152)..(152): n is a, c, g, or t
  misc_feature (154)..(154): n is a, c, g, or t
  misc_feature (156)..(157): n is a, c, g, or t
  misc_feature (161)..(161): n is a, c, g, or t
  misc_feature (171)..(171): n is a, c, g, or t
  misc_feature (178)..(178): n is a, c, g, or t
ggtanctctnggnctgcgaanangnctctnagccttncncaagcgngcgcgagagaagcggcnnacnnagctaccgnttcacccgnccgactaaaanacaacagncgcagacctactttgattcanaagaaaggngacggnttcgcnaacangnanncggntttctatcanaggtgcnagggttccaaacc

SEQ ID NO: 759 - DNA, 110 bp, Unknown Organism
  polynucleotide sequence showing no homology to known genes
  misc_feature (4)..(4): n is a, c, g, or t
  misc_feature (8)..(8): n is a, c, g, or t
  misc_feature (15)..(16): n is a, c, g, or t
  misc_feature (31)..(31): n is a, c, g, or t
  misc_feature (104)..(104): n is a, c, g, or t
cctntggngttctgnnaattcttgtacacanaagggcaaaacaaacaaaggaagagcagcaaagtatgagtagagcttcagtagtactagtagctattatggtngtggaa

SEQ ID NO: 760 - DNA, 67 bp, Unknown Organism
  polynucleotide sequence showing no homology to known genes
  misc_feature (2)..(2): n is a, c, g, or t
  misc_feature (13)..(13): n is a, c, g, or t
gnggcattcggancgatggattggtcttcataacattcatcatctttacattgcagcatttcagaag

SEQ ID NO: 761 - DNA, 92 bp, Unknown Organism
  polynucleotide sequence showing no homology to known genes
  misc_feature (7)..(7): n is a, c, g, or t
  misc_feature (10)..(10): n is a, c, g, or t
  misc_feature (12)..(13): n is a, c, g, or t
  misc_feature (15)..(15): n is a, c, g, or t
  misc_feature (17)..(17): n is a, c, g, or t
  misc_feature (20)..(20): n is a, c, g, or t
  misc_feature (22)..(23): n is a, c, g, or t
  misc_feature (46)..(46): n is a, c, g, or t
  misc_feature (53)..(53): n is a, c, g, or t
  misc_feature (55)..(55): n is a, c, g, or t
  misc_feature (64)..(65): n is a, c, g, or t
  misc_feature (67)..(67): n is a, c, g, or t
  misc_feature (83)..(83): n is a, c, g, or t
tcaaaantantnncntnctngnnctgcacattgagcatgtgctcancaacctntnttgtgctcnntnttcccctgaacatagnagtatgcag

SEQ ID NO: 762 - DNA, 74 bp, Unknown Organism
  polynucleotide sequence showing no homology to known genes
  misc_feature (4)..(5): n is a, c, g, or t
  misc_feature (14)..(15): n is a, c, g, or t
  misc_feature (18)..(18): n is a, c, g, or t
  misc_feature (31)..(31): n is a, c, g, or t
  misc_feature (46)..(47): n is a, c, g, or t
  misc_feature (49)..(49): n is a, c, g, or t
  misc_feature (51)..(51): n is a, c, g, or t
  misc_feature (61)..(62): n is a, c, g, or t
  misc_feature (65)..(65): n is a, c, g, or t
  misc_feature (67)..(67): n is a, c, g, or t
  misc_feature (69)..(69): n is a, c, g, or t
  misc_feature (72)..(72): n is a, c, g, or t
tagnncctgagacnnagnaagaagacagacngtcactgcaacgccnnangngagcatgacnngancngnggnac

SEQ ID NO: 763 - DNA, 42 bp, Unknown Organism
  polynucleotide sequence showing no homology to known genes
  misc_feature (10)..(11): n is a, c, g, or t
  misc_feature (14)..(15): n is a, c, g, or t
  misc_feature (22)..(22): n is a, c, g, or t
  misc_feature (32)..(32): n is a, c, g, or t
ggcacaagtnnaanngcctgtntcgaaggtgnggcaacaacc

SEQ ID NO: 764 - DNA, 83 bp, Unknown Organism
  polynucleotide sequence showing no homology to known genes
caacgtaaaggattcaattcttgttttgtttgttcatcattgaaataatttttttttagtcttgcattatatgtttggttggt

SEQ ID NO: 765 - DNA, 102 bp, Unknown Organism
  polynucleotide sequence showing no homology to known genes
  misc_feature (8)..(8): n is a, c, g, or t
  misc_feature (11)..(12): n is a, c, g, or t
  misc_feature (20)..(20): n is a, c, g, or t
  misc_feature (29)..(30): n is a, c, g, or t
  misc_feature (40)..(40): n is a, c, g, or t
  misc_feature (44)..(44): n is a, c, g, or t
  misc_feature (51)..(51): n is a, c, g, or t
  misc_feature (53)..(54): n is a, c, g, or t
  misc_feature (61)..(61): n is a, c, g, or t
  misc_feature (71)..(71): n is a, c, g, or t
  misc_feature (81)..(81): n is a, c, g, or t
  misc_feature (91)..(91): n is a, c, g, or t
  misc_feature (96)..(98): n is a, c, g, or t
ggcttggnggnngcgggtgnccaccatgnnatgcatacantatncatgtangnngctacanagacacattnggaataatgngtcggatcgnttagnnntggg

SEQ ID NO: 766 - DNA, 134 bp, Unknown Organism
  polynucleotide sequence showing no homology to known genes
  misc_feature (2)..(2): n is a, c, g, or t
  misc_feature (8)..(9): n is a, c, g, or t
  misc_feature (106)..(106): n is a, c, g, or t
cncgattnnatacaaccctgagaaaagaatgttaaaaaatgactatcttttgtaaagaaacccctttcatttccaggcaatgcaagggggatcacagttttacatngtgggtgtggttattttacgtcacagtt

SEQ ID NO: 767 - DNA, 96 bp, Unknown Organism
  polynucleotide sequence showing no homology to known genes
  misc_feature (10)..(10): n is a, c, g, or t
  misc_feature (12)..(12): n is a, c, g, or t
  misc_feature (17)..(17): n is a, c, g, or t
  misc_feature (20)..(20): n is a, c, g, or t
  misc_feature (22)..(22): n is a, c, g, or t
  misc_feature (31)..(31): n is a, c, g, or t
  misc_feature (44)..(44): n is a, c, g, or t
  misc_feature (47)..(47): n is a, c, g, or t
  misc_feature (50)..(50): n is a, c, g, or t
  misc_feature (54)..(54): n is a, c, g, or t
  misc_feature (62)..(62): n is a, c, g, or t
  misc_feature (67)..(67): n is a, c, g, or t
  misc_feature (75)..(75): n is a, c, g, or t
  misc_feature (79)..(81): n is a, c, g, or t
  misc_feature (87)..(87): n is a, c, g, or t
  misc_feature (94)..(94): n is a, c, g, or t
acgatcgatnangtggnctngnaacattcancatactttacatnganatntcanaggttacncaggnctcatcantggnnnagcctntgctcancg

SEQ ID NO: 768 - DNA, 63 bp, Unknown Organism
  polynucleotide sequence showing no homology to known genes
  misc_feature (23)..(24): n is a, c, g, or t
  misc_feature (28)..(28): n is a, c, g, or t
  misc_feature (54)..(54): n is a, c, g, or t
  misc_feature (56)..(56): n is a, c, g, or t
tcgcacacagtatcatgagaatnntggncttgtcatcctcaaaagaatcctgtnanagcatgg

SEQ ID NO: 769 - DNA, 135 bp, Unknown Organism
  polynucleotide sequence showing no homology to known genes
  misc_feature (1)..(1): n is a, c, g, or t
  misc_feature (10)..(10): n is a, c, g, or t
  misc_feature (18)..(18): n is a, c, g, or t
  misc_feature (31)..(31): n is a, c, g, or t
  misc_feature (53)..(53): n is a, c, g, or t
  misc_feature (91)..(91): n is a, c, g, or t
  misc_feature (125)..(125): n is a, c, g, or t
ntctacaatngcatacancatcaagcatagncaatcacaaacatgtcatgtanaagtcctgaaatttcgatgtcaggactaagctataagnactactacatggaaagcatatatgtgcattcgtngtccaagcat

SEQ ID NO: 770 - DNA, 339 bp, Unknown Organism
  polynucleotide sequence showing no homology to known genes
gagcctgctggatcttctttctcttagcaaagaggaaaggaagaaactagtcgaagagcgccctggaatcaataattctactattactgctctcatttctctaaaatggaaggaattgagtgaagaagaaaaacaagtgtggaacaacaaagcagctgaagcatacaaaaaggaaatggaagagtacaacaaatctgtagcagaaaagcagaacaacaattagaaatagtagaaataactataatatgttcaactgattatgttgaacatagaatgattgctagttagttgaagtagtaaataggtatcattccaatttcctttgttgtttagtagcag

SEQ ID NO: 771 - DNA, 87 bp, Unknown Organism
  polynucleotide sequence showing no homology to known genes
  misc_feature (5)..(5): n is a, c, g, or t
  misc_feature (11)..(11): n is a, c, g, or t
  misc_feature (15)..(16): n is a, c, g, or t
  misc_feature (20)..(20): n is a, c, g, or t
  misc_feature (24)..(24): n is a, c, g, or t
  misc_feature (33)..(33): n is a, c, g, or t
  misc_feature (39)..(40): n is a, c, g, or t
  misc_feature (42)..(42): n is a, c, g, or t
  misc_feature (52)..(53): n is a, c, g, or t
  misc_feature (67)..(67): n is a, c, g, or t
  misc_feature (79)..(79): n is a, c, g, or t
  misc_feature (82)..(82): n is a, c, g, or t
  misc_feature (85)..(85): n is a, c, g, or t
tccgntgcaancggnncttncacncttagcaanaacacnntnctggggattnnagtcatgccacaantagcaggggctnagncgncc

SEQ ID NO: 772 - DNA, 135 bp, Unknown Organism
  polynucleotide sequence showing no homology to known genes
  misc_feature (7)..(7): n is a, c, g, or t
  misc_feature (10)..(10): n is a, c, g, or t
  misc_feature (12)..(13): n is a, c, g, or t
  misc_feature (32)..(32): n is a, c, g, or t
  misc_feature (41)..(41): n is a, c, g, or t
  misc_feature (46)..(46): n is a, c, g, or t
  misc_feature (55)..(55): n is a, c, g, or t
  misc_feature (57)..(58): n is a, c, g, or t
  misc_feature (60)..(60): n is a, c, g, or t
  misc_feature (66)..(66): n is a, c, g, or t
  misc_feature (72)..(72): n is a, c, g, or t
  misc_feature (78)..(78): n is a, c, g, or t
  misc_feature (80)..(80): n is a, c, g, or t
  misc_feature (84)..(84): n is a, c, g, or t
  misc_feature (87)..(87): n is a, c, g, or t
  misc_feature (90)..(91): n is a, c, g, or t
  misc_feature (96)..(96): n is a, c, g, or t
  misc_feature (98)..(99): n is a, c, g, or t
  misc_feature (117)..(117): n is a, c, g, or t
  misc_feature (119)..(119): n is a, c, g, or t
  misc_feature (122)..(122): n is a, c, g, or t
  misc_feature (124)..(124): n is a, c, g, or t
  misc_feature (126)..(127): n is a, c, g, or t
  misc_feature (129)..(129): n is a, c, g, or t
  misc_feature (133)..(134): n is a, c, g, or t
ggttctnctntnnctgctgcgcctgacagcanttgtgtggntctgncgctgcacncnncngctgtntacgcnggaggngnaaanggntgnncctgntnnggagtcacatgatgacangngtnananntngttnna

SEQ ID NO: 773 - DNA, 94 bp, Unknown Organism
  polynucleotide sequence showing no homology to known genes
  misc_feature (2)..(2): n is a, c, g, or t
  misc_feature (4)..(4): n is a, c, g, or t
  misc_feature (17)..(18): n is a, c, g, or t
  misc_feature (24)..(24): n is a, c, g, or t
  misc_feature (41)..(41): n is a, c, g, or t
  misc_feature (44)..(44): n is a, c, g, or t
  misc_feature (51)..(52): n is a, c, g, or t
  misc_feature (64)..(64): n is a, c, g, or t
  misc_feature (66)..(66): n is a, c, g, or t
  misc_feature (69)..(70): n is a, c, g, or t
  misc_feature (74)..(76): n is a, c, g, or t
  misc_feature (80)..(80): n is a, c, g, or t
  misc_feature (86)..(86): n is a, c, g, or t
  misc_feature (91)..(91): n is a, c, g, or t
  misc_feature (93)..(93): n is a, c, g, or t
angngctatatcttcgnnagaaanactgctgcgcagtgtgnaanagcgtgnnttcacggtatgnanggnngatnnnactntgcagnaactncna

SEQ ID NO: 774 - DNA, 46 bp, Unknown Organism
  polynucleotide sequence showing no homology to known genes
  misc_feature (7)..(7): n is a, c, g, or t
  misc_feature (15)..(15): n is a, c, g, or t
  misc_feature (31)..(31): n is a, c, g, or t
  misc_feature (35)..(36): n is a, c, g, or t
  misc_feature (41)..(41): n is a, c, g, or t
ctgttgntctttggncacatgatgattcagnttgnnaaatntgtgg

SEQ ID NO: 775 - DNA, 86 bp, Unknown Organism
  polynucleotide sequence showing no homology to known genes
  misc_feature (27)..(28): n is a, c, g, or t
  misc_feature (35)..(35): n is a, c, g, or t
  misc_feature (41)..(41): n is a, c, g, or t
  misc_feature (46)..(46): n is a, c, g, or t
  misc_feature (63)..(63): n is a, c, g, or t
  misc_feature (70)..(70): n is a, c, g, or t
  misc_feature (73)..(73): n is a, c, g, or t
  misc_feature (75)..(75): n is a, c, g, or t
atagtaacgtgcctctttgtttctgcnntcaattnggctanagtcnagtggagtaacgcgtgngccattnttntngaagctgtcgg

SEQ ID NO: 776 - DNA, 97 bp, Unknown Organism
  polynucleotide sequence showing no homology to known genes
  misc_feature (1)..(1): n is a, c, g, or t
  misc_feature (14)..(14): n is a, c, g, or t
  misc_feature (19)..(20): n is a, c, g, or t
  misc_feature (25)..(25): n is a, c, g, or t
  misc_feature (28)..(28): n is a, c, g, or t
  misc_feature (39)..(39): n is a, c, g, or t
  misc_feature (42)..(43): n is a, c, g, or t
  misc_feature (60)..(60): n is a, c, g, or t
  misc_feature (69)..(69): n is a, c, g, or t
  misc_feature (75)..(75): n is a, c, g, or t
ntttatgccggaanaaagnnaggcnagnatgcagatgcnggnnacataacgctaatatgnggatgaatnaggacnagcagcagtgaaactccttccc

SEQ ID NO: 777 - DNA, 92 bp, Unknown Organism
  polynucleotide sequence showing no homology to known genes
  misc_feature (1)..(1): n is a, c, g, or t
  misc_feature (6)..(6): n is a, c, g, or t
  misc_feature (15)..(15): n is a, c, g, or t
  misc_feature (23)..(23): n is a, c, g, or t
  misc_feature (33)..(33): n is a, c, g, or t
  misc_feature (37)..(37): n is a, c, g, or t
  misc_feature (42)..(43): n is a, c, g, or t
  misc_feature (45)..(45): n is a, c, g, or t
  misc_feature (54)..(54): n is a, c, g, or t
  misc_feature (59)..(59): n is a, c, g, or t
  misc_feature (63)..(63): n is a, c, g, or t
  misc_feature (65)..(65): n is a, c, g, or t
  misc_feature (67)..(67): n is a, c, g, or t
  misc_feature (78)..(78): n is a, c, g, or t
  misc_feature (82)..(86): n is a, c, g, or t
  misc_feature (91)..(91): n is a, c, g, or t
ngagtnaagggccantctgaatntggcctaatntggntaaanngnggggagtangccgnacanantnattcttgtggntggnnnnncgttna

SEQ ID NO: 778 - DNA, 54 bp, Unknown Organism
  polynucleotide sequence showing no homology to known genes
  misc_feature (15)..(16): n is a, c, g, or t
  misc_feature (35)..(35): n is a, c, g, or t
  misc_feature (45)..(45): n is a, c, g, or t
ctgatatggggattnngaggcaaggggtatggggnatcatgaagntggttgcag

SEQ ID NO: 779 - DNA, 56 bp, Unknown Organism
  polynucleotide sequence showing no homology to known genes
  misc_feature (3)..(4): n is a, c, g, or t
  misc_feature (20)..(20): n is a, c, g, or t
  misc_feature (34)..(34): n is a, c, g, or t
  misc_feature (36)..(36): n is a, c, g, or t
  misc_feature (39)..(39): n is a, c, g, or t
  misc_feature (43)..(43): n is a, c, g, or t
gannaggcgctccctccttnctttgtgatgacancnatngaangagaagactccta

SEQ ID NO: 780 - DNA, 62 bp, Unknown Organism
  polynucleotide sequence showing no homology to known genes
  misc_feature (13)..(13): n is a, c, g, or t
  misc_feature (18)..(18): n is a, c, g, or t
  misc_feature (20)..(20): n is a, c, g, or t
  misc_feature (22)..(22): n is a, c, g, or t
  misc_feature (27)..(27): n is a, c, g, or t
  misc_feature (35)..(35): n is a, c, g, or t
  misc_feature (45)..(46): n is a, c, g, or t
  misc_feature (53)..(53): n is a, c, g, or t
  misc_feature (58)..(58): n is a, c, g, or t
  misc_feature (61)..(61): n is a, c, g, or t
gaagcatagcccngcgcngntngcgtnaatgagancacagatggnnctaaaanatgantgnt

SEQ ID NO: 781 - DNA, 62 bp, Unknown Organism
  polynucleotide sequence showing no homology to known genes
  misc_feature (8)..(8): n is a, c, g, or t
  misc_feature (35)..(35): n is a, c, g, or t
  misc_feature (42)..(42): n is a, c, g, or t
ccgcctantgcctgttaagtctagcaacctcctcnagagttngggaattcacaatggcagcc

SEQ ID NO: 782 - DNA, 82 bp, Unknown Organism
  polynucleotide sequence showing no homology to known genes
  misc_feature (4)..(4): n is a, c, g, or t
  misc_feature (13)..(13): n is a, c, g, or t
  misc_feature (16)..(16): n is a, c, g, or t
  misc_feature (30)..(30): n is a, c, g, or t
  misc_feature (42)..(43): n is a, c, g, or t
  misc_feature (47)..(47): n is a, c, g, or t
  misc_feature (54)..(54): n is a, c, g, or t
  misc_feature (60)..(60): n is a, c, g, or t
  misc_feature (65)..(66): n is a, c, g, or t
  misc_feature (72)..(72): n is a, c, g, or t
  misc_feature (78)..(78): n is a, c, g, or t
  misc_feature (80)..(81): n is a, c, g, or t
gtanggccgagtnaanggtagcagaacttngaatgtgggacnngagngtacaangcgtcngacanngacttngtgtanannc

SEQ ID NO: 783 - DNA, 88 bp, Unknown Organism
  polynucleotide sequence showing no homology to known genes
  misc_feature (3)..(3): n is a, c, g, or t
  misc_feature (16)..(16): n is a, c, g, or t
  misc_feature (47)..(47): n is a, c, g, or t
  misc_feature (59)..(59): n is a, c, g, or t
  misc_feature (66)..(66): n is a, c, g, or t
  misc_feature (69)..(69): n is a, c, g, or t
  misc_feature (84)..(84): n is a, c, g, or t
  misc_feature (86)..(86): n is a, c, g, or t
ggnagcgctagatgancaagacacaattgatatgcagtcttaggaanctagagagagantgtagantanggtgatgaacgcacntngg

SEQ ID NO: 784 - DNA, 91 bp, Unknown Organism
  polynucleotide sequence showing no homology to known genes
  misc_feature (6)..(6): n is a, c, g, or t
  misc_feature (25)..(25): n is a, c, g, or t
  misc_feature (28)..(28): n is a, c, g, or t
  misc_feature (39)..(39): n is a, c, g, or t
  misc_feature (41)..(41): n is a, c, g, or t
  misc_feature (53)..(53): n is a, c, g, or t
  misc_feature (55)..(55): n is a, c, g, or t
  misc_feature (59)..(59): n is a, c, g, or t
  misc_feature (69)..(69): n is a, c, g, or t
  misc_feature (72)..(72): n is a, c, g, or t
tatttncctgcgtgacctagtaaanatngataggcctcnanaggtggggttantnaggnctcatcaatnccnagacccaaatcaggcaatc

SEQ ID NO: 785 - DNA, 97 bp, Unknown Organism
  polynucleotide sequence showing no homology to known genes
  misc_feature (5)..(5): n is a, c, g, or t
  misc_feature (8)..(9): n is a, c, g, or t
  misc_feature (17)..(17): n is a, c, g, or t
  misc_feature (26)..(26): n is a, c, g, or t
  misc_feature (34)..(35): n is a, c, g, or t
  misc_feature (48)..(49): n is a, c, g, or t
  misc_feature (54)..(54): n is a, c, g, or t
  misc_feature (66)..(68): n is a, c, g, or t
  misc_feature (73)..(73): n is a, c, g, or t
  misc_feature (77)..(78): n is a, c, g, or t
  misc_feature (80)..(81): n is a, c, g, or t
  misc_feature (87)..(88): n is a, c, g, or t
  misc_feature (94)..(94): n is a, c, g, or t
  misc_feature (97)..(97): n is a, c, g, or t
aagcnganngacctgtnttgcacctnaatatccnnagccaaggaaganngacgntggctggatgannncaatncttnnannaaccanntactgnccn

SEQ ID NO: 786 - DNA, 17 bp, Artificial Sequence
  Synthetic polynucleotide sequence
ctcgtagactgcgtagt

SEQ ID NO: 787 - DNA, 18 bp, Artificial Sequence
  Synthetic polynucleotide sequence
gatcactacgcagtctac

SEQ ID NO: 788 - DNA, 16 bp, Artificial Sequence
  Synthetic polynucleotide sequence
gacgatgagtcctgag

SEQ ID NO: 789 - DNA, 14 bp, Artificial Sequence
  Synthetic polynucleotide sequence
tactcaggactcat

SEQ ID NO: 790 - DNA, 18 bp, Artificial Sequence
  Synthetic polynucleotide sequence
  misc_feature (17)..(17): n is a, c, g, or t
  misc_feature (18)..(18): n is a, c, g, t or not present
gactgcgtagtgatcynn

SEQ ID NO: 791 - DNA, 18 bp, Artificial Sequence
  Synthetic polynucleotide sequence
  misc_feature (17)..(17): n is a, c, g, or t
  misc_feature (18)..(18): n is a, c, g, t or not present
gatgagtcctgagtaann

SEQ ID NO: 792 - DNA, 25 bp, Artificial Sequence
  Synthetic polynucleotide sequence
ttttttttttttttttttttttttt

SEQ ID NO: 793 - protein, 4 aa, Artificial Sequence
  Illustrative motif
DEAD

SEQ ID NO: 794 - protein, 4 aa, Artificial Sequence
  Illustrative motif
DEAH
